United States Patent Application Publication US 2022/0211063 A1 - sequence listing, part 15

SEQ ID NO: 17 - DNA, 233204 bp, Penicillium roqueforti
  misc_feature (10464)..(10482): n is a, c, g, or t
  misc_feature (32285)..(32304): n is a, c, g, or t
  misc_feature (34336)..(40656): n is a, c, g, or t
  misc_feature (41676)..(47867): n is a, c, g, or t
  misc_feature (53530)..(53793): n is a, c, g, or t
  misc_feature (86714)..(86732): n is a, c, g, or t
  misc_feature (112665)..(112869): n is a, c, g, or t
  misc_feature (199082)..(199290): n is a, c, g, or t
ggtcgtatgtggtggcggctcgtatgtgaattacgttatggatgggatagattcgtttgacttatggaggtttacacattaacggggtcgattttaataggacgtagctgtatgcaactaatagttactagttgaacctcagaatgcaagtagatcagcacaattcagttaacatttcccaagacatacatatttctcggccaaattgaatagagcgatagtcaccgggaaaagattccccaagtggggaaatttcggctattgcatgggtagctgtcagcaatcgagaaccctggaaggaacagttaattacatacacagattgcggactcccctccacatcgactgtttttgcatcccctctcaaaaccatggcgcatgacaatctgagccccgaagagatcgaaagagcatcccagcttctaagtgcacaagaaaaagccgtcgctctcttcgaggagatcgaacgcgatttggtccgaccaggaatcaccgaaaagaccctaaatgccgaaatctaccaattaggactcgatcgctatggtatcaagacccattggcacaaacgagtcatccgcagcggaccaaacaccttgagcccgttcaacgataaccctccggatcgtgtcatccagccggatgatatcctggttgttgacctggggccggtcttcgaagcctgggaagccgactttgggcgcaccttcgtcctaggagatgatccaaataagaagaagctgcgggacgccctggagcccatctggaacacagtcaaggcaaaatatcgcgagaacccagatatgtcgggcgacgaactatacaatatctcctgccaggttgcgaaacaagatggctgggatttcggcgcggatattgcgggccatctcgttgggtcgttcccgcatgaacgcattccgcgggacagaatctccctgtatatcgccaagggcaataatgagtcaatgggtctgtcgggccgtgatgggttcaagcgtcattggattctggaaattcatcttcatgataaggcacgcgggtatggtggtttctacgagcaactcttgacggttgattaggctttctgggatgtttctatgcaagtcatactacttattgcgatggacgcaattcatggattcctcgctgttgctttccgttgagtgtactatgtatgtctttaatgcggcggacataattcatcaagaccttcttctaacgcgtgaaagaaccgagcgccttgtttaagtatccagacagtgcattcgggatggttctatgtgcagttttaggatatgccagattgataggcctttaatttagccctcagcctcgtaggagttcgacttgtgcttgggctcgaacttgaaagtgtcgggtgcaggacccaggaacatttcactgtagtatcaatgaatgattagttaatgagtcaaaaacgttaatgaaagaaaacttacgtgatcttgatccagtccttgtagtttccactgcccattagcgtctccaactcattgcggccgcgccaagcaggaggtctgtcctgaatgttaggagggaggtgctccaacagtccaattgggacatagcgataggcaaagctgagccactctagcatgaagcggcgggttgttccaacaccatgctcatcagagccccaggcctgaagaccgtacttggcgaacttttcaatataggccagacgctcagtcgcggacttatccaaatactggccggtttgaatttcctcaaagatccatggcttgatcaaagctccacgagccaccatcacagagtccacaccagcattgttgacgtggtcatcgtagtcggtatgcgagtagcagtcgccgtttccaacgaaataagtcttgccgccattgggcatgtggcgggcatctggttcacgaatggtgtcggtcagtgcatcctgcttcttgtttaggcgctttatgagggctgcacagtctgagatgtatccccagtctgcttgtcgagtgtagcgctgctgtctactacgtccatgcagggtgatggctgcggcgcctggggggcccaggtccagaacactagattcatatccaccaagaaccatacgctcaaccagcttctgggcggtaggttggttatccttggttcccatgcgaatcttgacggtaatcggaatctccagcgagacagtgttcataccgcgaatcatcttctctaatttggagtgatgatcaagaagagctgagccagctccatcacggaatacaagctcaatggggcagccgcagttcaagtcaataacgcgcaggttgggtgtaaacttcgacaacacctcagtagccttgagagcttgccatggcttgttggcggcaatttgtgcgccgaacttgaaatctttggagttatcatagccctgaacaacattgtcgcctgggatgacggttggcggtgtcatttccgactcgtgcgccttcaacagggtccattcggactttgagccttgaatcaaaggcatactcatagccatctctgagtatgtaaactgcgcgcccaggtctgtacagagtcttcggaatggcatgttgccttgggttgtgagaggtgccagaacaggtgtctccggtccaaaataaatgcgacgcttctctgacggcatgaagggaggctcaaggaactgagcacggttctcctgcaggtcgatcttcgcctgctcgtccggttcaacaagctcacccttctcgcgaatagtggatcgctggtggatcgccttctccaattcggcagacacttgaacggaccatgtggtgtaggcatcagcccggggggtgtcctcgcgctttctcgtaagtgccattttgtcttgattggaaatgatgttgacaattccctcgggtgtggcgtgggccacacgaggccgagctttctccatacgttctgcgtcctcaagcaagatcaattctttcttgccgtcttcagtctctctctcggttgagtgtgagccaaccatgcgacatttccagccggaagagcatttccctagcgcttcgtagacgggacacatgttgttcagggttgtgagatcctcgcgtttatggtctttcaaataaacacgcagatcgtgctcaaatcggcatttctcgccatattggcactctccggcggcaaattcgttggcgaacattctcgtgctgcagagacccttcgcatctttagatgtaccgtaagtgcgattggtgttctggcccttcttcttcttctttcccttgtccttcttgccaccgtcacgatcatcgtgggcagcgccctcggcggcatcatcagtgttagtttcatcggcagggcgaggcttgggtgtgatatgaatgcgatacctgattgatgaaagttagtacttcataatcattgaggggtagctggacgtactctgctttgataggtgcaattcctctgtcgcgcatatctacctgggcgggttttgaaggttcatccaatcgtgccttcttggctggaggctcttccacatccgctgcgccaggatcatttgcggcgtcgcgcttcggaatctcattgtcaggcgtagcaacattagccactggggtttgggcctgtatagtctctggctccattgtatttagagggaaaagcgaactgttcactaaacttcgcaatcgctatcggaggaacattcagtcaaaatttcgaatccaggctattgtttgcattgtttgcattcaatacaattggctcggtaggtttgtggatccttttctataacgggcaagcgcaaacttaaatcctacaaccccgctcattgccttcggcatccaggtatctccatgctcgacaattaatcaatcaatacatcgataccgggacaaataccatatgtacagtatgtgccgatgcggccggattcagccgccccctcgatcgagtttggcgtcccccccgtttgggtttggtccatcccaattcggtttggcgccccggactatcctcaaactggcatctgccatctccgaccgcctgccagcctcaccctttacactaggtatataacttccagtgcgtcgctcgatcatcctcctctctttgactgactgtactcttttctctcccgtcatgcccagccgcgaaatgataccgtaattttggatcgcacggcatccttccccctgcacctccctatttcagctgagtttctcgacatacctccaggggcttcaccagtccccttgtccgggatggcaacacaaagcccatggtttctgcgtttcccccctgaaatagtttcatccattgtgtcctttctgccaaataaagatgtcaagtccttgcgcttaacgtataaagccctcggcgagatttcaccattctcctcctcacgtgtgtttctttccgccaattcgttaaatatccaagtttttcgggctatagtagactatctaaagtttcgccacaaaatcagggagattatctaggataacgcacggtttatactcgcgccgttaatataggaaactatatacctaagcatcgaccccgaatacatagaaatcaactcgactaagggatatcctatctagtttatagaggaatacgaagagaaccgctataggatgaagtatcagaaatactgtaacgtagaccgacctaaccatattatacattagtaccagatagatacctaaatgccgttaaaagcctattagaagtattatcgctaactataggataatcagatatctataatcggatccaaagataataaaaaagcctttctttatagcctagagcgattcctatagcttaagagagtgaccgttacgcctacggctcacagctagctgtttactccgctatataagatacctataatccaagcatttctatatagattcaactatccgattccgcgaggatagtactatgatcccgttaattatcgggttatcgagccgctactatggttagaggcaaccgaggactataaggagctatagagaggggctcaaattgttcttcgccttttattataagctaagtataatatttccgagctaagcttcaactctaagcaactctataccagactaaacttttggattttcgaccggccctataaggaatacaatcaatttacggctatcataaaacgtctaggcttctggtatctttatctatctttactcactagtagtaactgggtaggattccaaagcggattattctatcaagctatgagcctggctaaggaattgacctatatccatttatcaactacattcaatgatagatctcattctttaataagtgttgaatttcgtacagcgtaatttaccactagaccataacaaaaaccaaggttcttgtttagggcctagaggggccatatcccattcttgacaataaggaatctacctattcccctaaaggaggttctgcctattaaggagtggccgaatctatctcacttagcgctctctcgtttcagcgttaatacatcggagttgatagatatactcaaattggcaccatcctcattacaatctcttgacttagaatttatcgagttcccctttgatgaattgtgtttaactggtctactggagaggatgtgagaggaactagattggactgagagatcaaccgtcgaaaccgaccgttacgatcgcgatgggaggccatcgcatatggccgggggggttcatcaaactttcaaacgaggtagcaagctttatttatggctctggagaaaatcccttggatggaacagatacacgcagccccaaagacggatacgggacgaatcatgacctttttgaggcggagtacactcggcccaacgtcaatttccaggatcttaggaaactgggaatcatttgttaggaatgctacctagctgaccccgaacctgatgcattctgacgtgctcactgttgccctatgcagtttgtagacctttctgtgtggcattccttccctttctctttctcctctctggcagacagcttgccgcgtcggcgttttctttgtatgtctgcagagatgcttcttctgtgttctggtggatggattctggctggctttgtggtgtgaagctatatagacaagcttcagtacagtagctagtttcccatcttccatcaaacttcatctttctgcctctggctgatcactccattccctcgtagtcaggacctctcatcagagccgaaggtttgaatgtcttgcattgagttttaatcttggaaccttggaaggttattaatacccattcgtctattcaaaaaaaaacctatcaatatgtatcaagacatgtccaatctgttacatgctgcggtttctactcgtctatcaagaccgagctacttccctacatatatatactgagtacctggatagatctcttgcgatagttatggtatccatcagatattttcttgctagttaaccgactacaataggactgatagcatctgataaataatccagatggccttttatatctattctcattgtgcaatccaacaaaccaaacctcgtccacatcgaactttcacttccaccccaaaagcaacctttgctttgttactatatgtaccctcaaacatacaattattccacttcacttgggcgcgtaactcagtggtagagtgttcgctttgcatgcgaaaagtccggcgttcaatccgccgcccgtccatctatttttgtccgtttcattttttgctcgcaaagccggtgcgatcaggcgagcgccacctccattttgcctagagtatgattatgaccttgattattttacgtttttctaagctttaatttctatatatgtctcgttatatgacttgcttgaatttgggtgattggtggacttactccaaatataaattgtacatattcaacccctaaccttttaataaaatcaattttagaaatgaaagagaagatactttatagcgtctattggggacaatcttacaagagcaacgaagaagataattccgaggaagtaatgaagatgcgagaaatgacttactatagtttctgaactgtccttttattttggtctgtctcggtttttaatatctagagcatatctgctgcacttgttcctgagacggctattacctttgaccgacttttccatatataatatgtgtgagcagagtgttgtcattcaattgatgatattgtacctcactccataaagagcaaattggttgtgatatgtggtatcagactctaactactagctccccatcaaatccaggtgcctgagaaaagtaataaccgcgctgattactgaccaccatcttcttggtactctcctcaatgtaattgacattgaagtgcgtatgcccaaacgcccataattttacgagcggactcttccagacctcctgcctagagagattgctggcaaagcccgacgacagcgagctgtttacatgccttggatcaaccgcccgcggatcctgagtgactgggctatgatgtgtaaaaaccacgagcttgcgatgcggctcagagctagcgatatgagaaacctgtctatttaaccaccccaagtctgcatcatgggcagctgtgtggtcgtcaaccgtccagtcttttatgttgtaaaagtcattgagaccatagctgacgtgctccttatgggcctcgctcactcgcgaaaaaagtgtgcaccctaggacagtcacttctggtgagaggtcgtagcgagtctgatccaagaagacgaaagaacccatagtttccggatgtccatcttgttctgttgaacgccgacgatcaacagatgccgaaaattgatgaaggagtttcttcgtctcctcccaggttgaatcgtagggctcatggtttcccaacaggaagaaaacgatttggaattggcgcaactgggtctcgatgaatgtaatgaagcctgcgtcattgacaactcctatgtcacctaggagggcaagatatggcgccttcggggagatattgaacacatcataggcagacggattttctaaatgtaaatccgacaatatctgaaacgtggacatctggccgtacaccgaatgaggcaagttttgctgatgttatggatgaatgtctgggggggcgatagtcaccaaccaaccagatgcaatgccaaaagacccgccaagtgtggctaagttacatgtggcggtgcggatatacatagtgtggcgtaacacagcctccttccctcagttgtctaagcgcccagacatggatgatctcataggaacccctccttggctcttggccaagaaaatatatttatctccttccttcccctatttcaacgttcctgatttctttgttccgaggttgtccttagaggcgttcctgagcttctttctatcagcttatcaactattgtcacacgacgtcataaccgcgttatcaacaccttaatattgcgggcaatattgaaagacacaagatagcgaccaacacgatggcgagcgcagcacacgatcccagactgctatacagcgtcaataatatccgtgctttccacatccaagatggcgaagagcaggacctcacgccgtccggcgctcaaaccctatcactgctaatggtccccaccaacaccgccactgctggccctgggacagattggcctgaagattcaccggaagaggatttctatcttcacctatacatcccacctgagctcgatattgcgatcccggcgaccacacagatcttccaccaagctcccgacagttatctgattccccgctgggacatgggtcccgaagctggcgctttcattcgcatccagttccctagcattggaactggccctagcaatgtgtctcaggatgatattgatacctttgaatctatccttgcgcagtgtactgcattcctcgagcgcaccccgtacccgaaagctcaggactatactgcttacaacccggccgactacgcacccggcgagggttatgtcgggacacccgatacaaagcaaggagatgcacatggaagaattgtgcttgtggacgaagaaaacggcagtgtggtcggagagctaggagacggctacaatgtagtcgaggatgccgacgtgaagcctggctctaagagtaagtgttgaatcatggtcacctgtcaatcagcaactgactaatatcgaacaggaccggtaggaattgaacttcctgcagaaggcggaggcaatcaagtcagcgtcagcaatgtctccgaagaatacctgtcattggcccggcatccggcatataagaactcgacactcgttcagagttcggctacagcatctcgtctgatagtgactggatcaacatatctggcaagtgctattgcgagtggcgcggagaatttccaaaagaagacacagccgaaccccaagcctttgaaattctcagacgctacccacgcgcgcattcgcaaggtcggcaatttatccaacggagcagcagatatttctgctcgcacagtcggacaggtcggaagagttgcacagaacataggcgcgtcactggcacgcaagcaagaatctggccggaataaaggcttcgacaggcgcaacccaccaccagaatacaagcccggtgtgttgaacaaatcaatgatcgcatttacaaccctggccgacggtatcgagcagagtgcccgaaacatgctattctccggtgctggcgccgccagctccatgatcgaacaccgttacggaaatgaggcaggcgccgtggcaacccacctgacgggcggaatcaagaacgttggattggtttacatcgacgccaccggtgtcagtcgccgcgcgctattgaagtctgttgccaagggcatggtcgttggaaagatgcgcgatggtcaacaggttgtcgtcggcggtggcgacggcggccaggtaccggctaacgccgtgcagtctgcttcgggcccttctagcttgggtgcccgggaccctgttgtgcggcgtgcgtcgcctacccccacaccgcctcctgcatatggtgcgtcggggacaaggtccctcaagggggggcccacgtcagggggtaagcggtaaaatctgggggctggcgctagttacagtgcttggaggagcgagatctcgtataggagatgtttgggttttttaatttttgtgatttggtatgacggacatgatttctctttttgcaagctcttgattgaggattgaggctggcagcttcttgattttcctattctacactttttgatacctatgtacttgatttcctctcattcttggctttccccttccgttttagtgctcagaccttgccgctccgcagccatcactggattgatcttgttttcggcagcaaacaaaagggcgaggcagctgtcgagtctgtcaacgtcttccaccatctctcatacaaaggtgctaaagacttagatgctatttatgacccaatggaacggttagccaccatcggcattattcannnnnnnnnnnnnnnnnnngcaaactcctcaccaaatcttccaccgacctcacgcccaggcctatatttagctaccaattacctttctctttcagttgatcggatcctgtagatgcatggttataatcagcttttcttgtggattatcgcttcttttcacttactgaatgtggcggatccatcgcggggaatattttgtattatcgtttcctggccaaaccctcgtcacgtgtcatgttgagttgtgatccatgtcaccatcctttaagaaagttcctcctctttgtttgctaaagtgaaaaaaaaatccaaactcctcttcctcctcctctagccttcatagcgacgatggctggtttttacttcacggaacaaaaattggaacaatgatcttatctcgtctatttctagttttctagactcaataggtatcccaaaccttctttggggtcaactatctacttactgtttatggagttcctacgattgtggatgtcagtattttatctcgattgaccggattaatctactaatattccaataggaagcagcttttgttattccggatgatcttacccaggtcgcattctcttcacttgagagtgctgggtttttaccctgtaacagcttaggctgtccgcacttagatacaaaccgagtgccaccggaatttaagcacctgcatattaatgatgaggttgcggtctcgctctatcggaaatctgatgtactatgggagtttgacttggagaaaaatccagatattatgattgcgtcggacgatcgactcccgtcggcatctccaggtcgtggccgaggacgcttcttatcgtgtccttgtaccgtgaaaatccattctgctgtgagatattgtgaggccctgattctattactttgccgtgactacgactcttcttatgagacttattggctagctattctgagctatatgttggagtatgttgacggtacggatatcttggatgaaaacaagttgcaagaaggttatagaaagttttaccatgccctcaaaactaggagatcaagagatgtatttaatactggatgagcttcgatttgcgttgattgaagagcgtcccctcccagtgatagattattaacaagaccgggctaataccccaagacacaacaagagacacaaataagacaccaaaaaagacaccaaagaagatatagcgcgttgtcctttttaaccttgccctcatgtagttattcaggacgtttgctgttgccttacgtaatataacttcaattctattggctagaaatgggacgcgccccaatatagtagcggccccacaaggtgcctacctagagagtatacaacagtaaagtcggggctttccactttctgtttctttcctctcatcatcactctccatctgacatccttttatcatggaatcacgtattgaagatggtcagccagatcctctgcatatcttttcggagtttgaagaccccactcgtcatagcctcatccagcagatcgttcaggatgacccaggattggccatgatcccgcagcagaatctctatgccttatggttcagtgatattagtactctacaggagaaggccaatgcgcaaaccaaagtcgcgaaaaagctccgcgcaagagacttgagggtgctctccaaccagtacgatgttgttggtatttgtgagtggatctacaagttatatctacaatattaaactaactattcttcaggggcttgtgaggggcagactactgcagccagcagagaagaaccccaaggttctgcgcctcggctgggtcttagtgaacgcggtcgatccagctcgcccaacactggctcctctagcaagccatctacgccagagcacgagaacacggtggatgtgagtttatcagaaatcacaaagaggaaatagtgctaatatggccttctagctcccatccgagagtgctaaccgtgatggttatcattgcgtagtgacgaagcgtggactaccattgattgagagtgcccatatcataccgaaaaagctcaacggtgctcggagtctgtacctcacgcaatatgagtgctgggcctggcttaatgctttctggggcgatgagaaagtcgacaggctgcaaagcctcttggtgtctgagggcataatggacacggagcgactttataaccagatcactctggatatccaggtgcagaaatattgggatcgtgcgatgtgtgcactccgccctatttgggtcagtgaagaccaaacggaaatgcaaatcgcgtttcattggctgcctcttcaagagaacctcccagagttggaaaatacttatcggggtgagatggtctcggttatggagaacccataccaggatccaaagtaccgacctcatgagacccctgggaacaataacttcattttccatatggagacgggagttagaatcccctcgggatatgtcttcacggtcaagacggacaataagtatgaacggccactgccctccatggaacttttggaactgaggtggcatctgtctcgcattgcttgtatgcggggcagagacgaggacggagatggtgcttatgagtctgatggtggcttttccgtccgttcaggctctcgatcccctatctagaaagaagttatgctccactcgaacatatctttccgtccagccaccaagccaccgtcgccctcaaagctacagaatgtgtctttcgagggtgatttcagtcccttatcccggagtggtgggatcttttcgcactcttgacggagtgactggtttcggtttgtcttgatactgatatgttagaataggatggacgtatgggttaggcctcatttcgcttaggtgaggataacaatgcatgttctgaatctgaccttcgaaaatatgtaaagttttcgtctgattcctatatgagtgacttccggtctttctgcgaccggggtcttccatgttctggaagatccaacagccatgagcttggacctctgctgctgagatgcgaccgtttggatgccagggtagacgaggcagatgtaaattatgctgtctgtcttcgtacagatatccattaaaatgaatttccaaattagagagtaaattattattcgagaaatgactcccaacccaaaacggcaaaccaggtacgcggtttacttcataaacaactaacaaacccaagtcactcctataaccagaatttgtccaaaaagcatattcaattcttgtttccaacccgcttttgcattgttttgcattttcgggcttatggcgagggcgaggatagccattagacagggttgctcatatgcgttgccagctgccgctggacgatctatcggatattgattgggtgatggtatacaacgttgtagaggcaaaaactgccaacgcatcgattgacagttgtccacggcccaccgtggtggctttgtccaatgagggcgatcagcactcacatgagtatcaagtcacaaacgcttgacatttacatctggagtattggtgatccgggggctgtcagaaaggtagaaaagcagtggaggatttagtggattgagcatcaattactccgtactgcatgcagatatgtactccgtatattgatggagacagtgggtaagtggatagcgtaaggtttagtcttgcaggccggactatccaggcaccgcatcgagtggtgtgcactccattttccggaccgagatttcaggacgtcaaggttgcagttggatataaaactcgagcagatcgggatccgaccatggttcttgccatgcttaccgtggttaggtggttccagggttcgggctatggcccctcttcaatctgcgtattacccccatacggagtccttcgtagcttcaaagcgttaaagcccgaagcgagagtccactatggtgagcgctaattgtcaggatcaagctagggaggtgaactactgcacgctattcttatatctaatctctggatctttgagtctgggattgatcaagtcaacaacattgagtttattaaaaatataattaatctcgtagtaacattgatttaattcagatgcgtacctatgtaattaggctggaccaatgaagaaggagaaaaaaaccgagatctgggcttccgttctgagagaggctaataatgacgatcgtcccaagtgtccactctatgaggattcgaaacagccggtgcaaccccctatttattattatttgcatctttcgcttgaaaccgagcaatttagcgcccggtcatgctactattatttcgggcttatccacagaggacgtcgtaacgccatacacttctctcccttctttggcacatgcgaggatttctcgggactcgagccctttttggcaaaggttactggcgcaagggattcgagatcaatatatgggcaattaatctatccactcctcatacaggatttagtttgtctttgttgtcctgatgtatcataacagtccttggcctatgtaccgactcggtatatgtagtatagcttctctattccagatcgtagcaagatacaacacgatagtcccatccatagtataatatcaagtagctcgtagacttccatgtaaacatccccgtatcatatcagtcaaaccctcatccaaggctcaagagccaaagacccgcctcccccagactaacagaaactaccagtcgtatcttacctcctcttttttccttcttcaccttctcatccggcctctccctctaccctttgggcctttttttttttcttttggtctgtgttttcttgtttctttgattctgttctttgggggtctcttctgccccctttttcgactcggatcccccgaccggtgtttcccgtctttttcctcccctcgcgacccctgtccgcgcccctcagtaatcctattttcgacaatgttcatctgttgtcgcaattgaatcagagttctgttgatcaggtccgcaatcgcgtccgagacatttgttaccgcgtttgctcgattccttggacaacgtgcgaccgcaaaccccaagtcgtgggtctggaggggaactcttgaagtactgcagcgcaggtatctttagctttcctttcgtttttcgagaaacttgttgtttttcgacgcgtcttgacacctgaacaagctcgcgacctggtgtcctcggtgatattcaaccatcatctaacggtttttgcgcgattggtcgtaagctagtccccccccattcctccgatcggatctcctgctgtcagttgtccacccccccattcttgggtgaaaaggcacatttttggcgattatcgataagcatctggggaaatattcaagctgacccatggcccaatgtctacagatcgcgctttgcagagtcatttggcgagtgcgaccggtcgccccaacctcccgacttttgccaaacacccccgggcattgtgttccctcgcgccaattgtgccaatcgcaattgataccagaatcgtgtcaacgagtgcccgcagaagctgcctcggaccgtcacacagcaagtctcgtaaggctttgcgcatctactagacaaaggtatgctatcggccgtgatgcatattgcctcacagcgcgtacccgtccgccaaaccattcaattcgataaataggttgctaatctccaaaagccgtttctgaggccggtcccgaacagctttttccggctatgagcacttctcatcagcaggccgtgccactccccgctcatgcctctgcagtatcgaccacatcatctccagcccagaagaatgcgcgcgcaccctatcccgacatgctaggttcaccgccggttcctcccccgaggacctcttccagtcgccgtactcaaaatgaaacctctacagagaaaacgagtagctctcgacaaggcaagagcaggtccgatcgaaaagacacccgtgatcgcacgcgcgatagcacgcgcgatgaccgaaatggcagatcacggaggcagcctgaggacacatctcgtgaagtacaatcaaggacggattcagaagtggacatccctggccgtgtaaaagaaccaagttcggaggccaagtctgtgctacctagtgactatggtatggacgagagagaacgacccgccacagaaaatgcctctacgggtagcgtcgaagaggaggctcgtgggcctcgaagtcggcatgattacaataatgggaacgttgtcaaacgcaaggaaaccaccttcggctcgtacattctcggacaaaccctcggcgagggagagtttggaaaggtcaagctgggatggaagcgcgatggcactctccaggtagcaatcaagctcatccgaagagacacactggggaccaaccccagccgattaccgaaaatctaccgtgaaatcgccattctgcgtgagctggcgcaccccaacattgtgcgcctccacgagatggtggaaactgaccgtcacattggtatcatcatggaatacgcgtcgggaggtgaactgtttgattacatcttaaataatcgatatctcaaggataattctgcacgccggctgtttgctcagctggtgtccggtgttggttatctgcacaagaagggtattgtgcaccgtgatctcaagttggagaacttgctactcgatcggaatcgcaacatcatcattactgactttggattcgccaacaccttcgacccggtggatcctttagacgaggaaatggagtacaacttgaccaacaaagaatacgtcaaacggaagcgactagacaagattggtccaaatgggctaaggcgaggcgatcttatgcagaccagctgtggtagtccctgctatgcagcccccgagcttgtcgtgagcgattctttatacacaggccggaaggtggatgtgtggagctgtggtgtaattttggtaagttttcctacagacagaatccgactcaactaacttgttacagtatgccatgctggcgggatacctacccttcgatgacgacccagcaaacccagatggcgacaacattaatctcctttacaaatatatcgtcactactcctctcacattcccggaatacgtcacgccacatgcgcgcgatttattgagacggatactggttcctgatccccggaaacgtgcagacctgttcgaggttgcccgtcacagctggctcagcgagttctcgaatgttgtgtctcatatcacaagtagtacgacaaacgttgtggacattgcgaatacaacgatcccatctggtaaggacttgctctctgcgggtggtcaagattcgaattgctcacataagtctatagaaacccaaaaggaagcaccgcctcttgtccgtagtgcttcagtgcgcgaaccaccgaagacacatcagcacgcccctgctgttggtggcttgaaccatcatgctggagatgtttctcaagacccgccgtccgaaaagtctagaaccccccgcgatgccaagcggagaacggtccaagtcgaatacgttgctcctcaatcacaaacgacccgaggagaacctccggtggaaacgtctgcatcacgaagccgagtcccggccccatctgaggcccagatcgcagcttcagcgcaacaacccacagagcctgcaactgcaccactcaacctgaacaagccacttccagggcacttgccgcggtcggcctcggaccacgcagccatgacggggtcgcagacgagtgggatgtcgcaagggcatcggccagccactggtacttctatgagctcctttggaaacactggtcgtttgccttctcgcggctcctatggacagccggtggctcctactgttaccgcaactaacacagaaggccgcctagcacagcccaagagcaggcaatttgctcttccacaggatcctgcacagggatcgagcacatctatccgtcgtgcaagcacccagaaccagcaattgcctgccacctttaacactactccccgacaagagccgccaaaaggccacaagaggtccaatactgtttccagcctgggcgagaaactgttcggtcgttctggttcaatattgggtggtcgttcgcagtctaatgccactcgtacaaagcaagacaagcgttatcctcctgtcagcatgaaggagcctctaccgagggaaaactccagagtgtctgtggattcccgccgctcgatgcaatacccccataaccgcaagacaagcgagtctggcgcggaaaaccgtcctcgtcgattctcattactcccgcaatccttctcatttcgcggtttctctaatacccgggctccgactcccgaagaaccctcgcagatccctcgtcccgtggacccccgtgtcccgcaacgccctacctcgggccctgccggcccctcgcagggtcgctctcgggcgacaagctatggcacgcaagaagctatggggatagttgacgagggacccggcgaagatgttcataccgaacctgagccgcttagctatgaggcccagattgatcaacagtttgcagacctgggatctcaatttgactaccaaagtggttcctttggagtcccctcgcctgaggaagtctaccagaactctgcagaccgcattgatcaacaaaatcactcatctaaaccaaactactacgatgattacaatggcccatatgacagcgcgcctaggcagtcgacgcaggttggccggtcaggccgtgggccgggtgttttgcagaaaagccaccgcaaattcgcggacgcctacgaatatgagcgcgacgggtctcaccattccggcagctcgggggctgcacgcaaagtcatggacttcttccgaagacgcgccaagtcccgcggcggcgatgaccgttgattttcggtttagccaatagataaaaagcaatattccatctcaaacggactgaccgcggagattggaccgatcaagcactcttgcggtttgagctttgatcttagaagccgattcaaaccctatcattctgatgcttcttttgagttgcttgaaagagcagcgaggttgtttggataccccgtgataccctgcttttgttcccttcttatgcatggagcgattcctcttcatccgtcgggtgtttgattaattatctagcattttctttatttcctttgtctagctacattttccttgctcctaatgtttcgcttttgttcgctgttccccccgttttacctcaatatgtgatttgcattccccttctactgttactattatctctggctgtaaagtgagacctcatccgtgttcttgttcagaacattttattattcttttgaaccttttttttcgcttctcattgtcccctcttagcttttatttgttcctctacgagaggctctgtccacgataattcaattgtgacattatttccattcttctgtctatgtctatgtaccttaatgtgtggctttgtcctttaaggtggatgtttctggagagttattcaggccttcctattctattgctactctgttactctattactagactacaacaaatgtggtcagtacactgttacttgggaagctccaatatacctcattatcaagcggaagactctatatctcccttcagctgcttgtagttgatgtagtgtaacatgattaacatcagaatacctattccagggtaggtactttcaaccgctcaaccttcaccagatcagcctccctattcaagctctcaatctcagccgtagtaaaaggaataccctccgccaaccgtttctcctcagtaatcatctcaatctccccagggaagtaaatccgatccacaccatccatcctctccgacccaacaacccgccgataaagataatccatcctccccttaaactcctcaatagtcataaacaaatccggcttaacagccaccaaaaaatgccccacatccgccggcctcgacgggtcatacgggttagtaacatgacccgcaaaagccgacccagaaagcaccccggagaaaacatccatcataaccgccagcgccgaccccttcggcccccccatcggcaacataacaccccccaaagcctccgccggatcatccgtcctagccccatccttatccagcgcccaatccgtcggaatcctctccccccgccgcaacgccttataaaccttcccccgcgccgcaaccgaaggcgccatatctagtataaacggtctgttgccctgccccgccggcgccccacacgcaatcggcgacacacccatcagcttctcccgcccaccccacaccggcagcgcgggcgagctattcgtaaacacgagcgacatcatgtccgcgtccagcgcttgctgcaccagccacgcagacatgccgaagtggttcgagtgcttgacggagaccattccgatgccgaaggtctgcgccattgagatggcgagtttcattccttcgtgcgcggcgacgaagccgaagccgttgtgcgcgtctacttgcgctgctgctggtgttatttgctggattgtgggtgttgcggttgggtctagggctttctgccggattcgttctatgtaggatgggatgcggttgctgccgtgtgtgtctacgccgcggaggtcggcggataggaggcatttggagattatttcggcgtgcggtgggggggtgttgtttgcgatgaggatttgtttgatgaaggtttggagggctggggggttgatgttgtgggtttggtggggttcgttgggttggtcggacattttggatttggattgggtgggtttgatgtgggattttgttgttttagaagctgggttgggtgtgggttgtcctgtagagattcttttatagacgcggggacggatgtgttgcgaaatgcggggccccacgggtttatgaggggtatagccctatttcggagtacttccgaggtttggtgggtatattctataacgaatatatggggtttgagagcttgatattgtcgaacctttcaaaaacaaaggatgttgcgcctgcctacgagatcattacggatatctattgatcctacgacatacacagtactccatactcacggtaaggtgcatggtataagccaataagaattaagtcaaggaatggccgctatgcacatccaacaagggcggtcggtgtaggaaccaacgccaatctcctcaatgcttaccccctgaatacattcaagatcagtaccccttccagcattgaattcccgtccaaatgagtgttccatcgctgcctgatgatctatcagattcagacttcggcgacgttgtgagcaccgaaaacgacgagcttgatctcgaagcaatctcagagccctggcataagtacgatataaaagaaacaccaaacgttttttaccctgtttatctcggagaagtcctcaatgagagatgtctggtcgaacataaaatcggtcatggcggcggctctactgtctagatggcccatgacctctatgataagagggacgtggccctcaaaatcatgtctttaggggactggggggagaacgaataccgcatgcagaacgaaatccttcaaaacgtgcatgatacttcccacctagtgatgtatctagggacttttctcatccctggaagcggtcatagggttctagtattccctttaatgggtccatgcattgtccctattgaaatggaaaaaatgccaatggccagccgcatgttcgctgctcgccaattgttagaagccttggaaagtctacataaagaagaattgtgcaccgtgggaagtcgacctactatattcattttccgttctaatgaacaatttatagatttaaatgagaggaactgtatgtgggggatgcgtcctctccatcatctcaataggaatgcgaaatacgaggcactcggtcggccactaaagctagctataccatatgtcgaactttgcaagaaggggtagtttgctcggccagttaaggtccccgagaatttacgcacagaggaattctttctcggtgactttggcctagcgaaaaagcttaccgatagcgtgactcaacgaggctatcccccttcgaaatattgttcccctgaacgtcttcacggggaagcgccaagtctgaactcaagtggattcgttaggagtttaggtctactacctgaaaagtggaagggtctttaccctggaggactcgattattggtatgaccaatcgcaaacgcctgatccggatcttgatgttgcctctagaattgcatactttcgtcccgatgctgatccgatcgagcgaaaccatgtggcctctatcatgtccaaagtgctctaatactgtccagagaaacgtccgagtgcaacacagcttttacaggatccatcattcagggccattatggagagatacggttgttgctcctcattatttcgtttcttattcgtcctgtttcctatgctgtaatattatttcttcatgtttagtgctggaacaactgcgaagatcgcatgagtcgcttgaagaataaagtgcatccattcagcttaactatagagtagatgttggagtaattcggttaagtactccgtatattataccgatatgccgaccaccgagatctccatattagggctatatgcaatgacagagaggatagtacagtccaaaatctgatttacgaggattaccatcttcgtccaattacatctcttaatgaacataacttttcggagcgagacaaagttgtcgattgctattgactttgtactgcgctatgacatcatactcggctgtgggcggcgattgccgtgtactcggcaaacatcccaccatgcaaattcacccgtttgccgacgcactatcgaaatcgttaaatatgcaacctagggcgaatgctgtatgcacccgatgccacagtagcaaggtatgttgttcttcatgaatagctcctatcaatactgatagcgatgaagatccgttgcgacctagaaggccggcgaagtggtaaatgtagccgttgcgagcgtataggctatacgtgtcagtaagactgcgtaatgatatatatctcccgaggcctataggctgacgttatagacctcacattggaaagcgaaggagagccctccacgcttcgctctactcgtcacatacaagtatcccgtcgccaagccgagcagtccctgtgacacaggagagcacagcacaggaagcaccctctccctttcgtcatcttggccgtcgggatataacatgtgtgggacctggggttgtcaacggctcgcaacagccgaattccatcgatggcagtcagctcatcctagacataagccaagcttgtcgtcttccatcccccatcatcgcccaagcgcttaccgatttctatttccgtgagctgttctacttcgtcccagttttagatcgtgggcagtccgagatagaaacctctactttgttacagcaatgcctgtgtttcgcgggaagtaccatgcgtcaaacggcagggccagccgagtggaccacgtttgccatttacgggcggatcagaacattgctctttctgaaccacgatccagctccattgaatatgctcagcgctctttgcatcctcagcacctggttcccatattctcctgatgcgatagtgctagacaacccgtggcaatgggctggtatggcaatccgactcgcgattcagttgcacttgcacgagaatgagacttacagcagattagaggattcaggaagagcgcgcaggatgtggtggtatctctttatcaacgatacattgcagacggcctgctgtgggcgtcctggaatgtttcccctggaaacctctgtgccactgcctgttcccagtgacttcaaacatgtcgatctcggatcacgcgttttctgtcagttaacagttctctgtacaaaactcaggaaggttgttgacctggccagagttgacaaggcctcatcagagcaggtgtatctgaacctggatggcctgagagtgtggagagaacagctgcccctcgaaagccaattgttcgacgtcgaaactaggcaaccatacaatcgcgctgtcgctgagctccatatattttacctagtgactgtcattttgacatgcttccttggccgccgggataacccgtcattgttcaaatacgcttcaatggctgcttcatcttgtatttcgcggctatacgaggagattctctatcacgaggatgtccaatacctactggcaatgcatacttgggctaacctcgtcgccggaatcccgcgagctttcggagacagcgatgtattgaatcctgaccgcgacgaggagctcagaatcagcaaacaggtgctggaaattatgagggagaagcatacctccgctacttttgtactcaacaaaatcaacggtctcaacaatatgcgcgcagattcggttcccgctcaagccgataacacgtgcggtgctcttccggtgtctgggcaaattcaactagctcagttgttccctttcccctcgaggttttgccctatgcttaggattctaagaactgcggaagctagcgaaaatcaaccaccggacgcgcttctcactttgcctgaagatagcaatgattggccgatggattggtcttcctttttatttgacggtccaatgagcttctaaaatacggaaatatgatattgctgtgaatactggctttaatagaaagttcatagtactaggcttactagctagaccgtagagttagattctagtgtatctattctctatttgcacattggtaaagcattcaggaaattatcgctggtatacaaacctagtaggcaaataataaatctcactattctatagaatcagtataaaggttagggattgcccccatcaaagaaacacggtctattaattcccccgacggatgaactcgatatttggtgtctcggcaaagttacggctctcgggtttgccgcttcggccattttgtgtcgcatattttcttctaggacttttatataaattgaacataagattctcatctcaaataattcctccagatcactcattagtaaagaacaaatatactatggcatccaatccgaacaccaccggaggcgtgcaactgacgttcctcacaacgggaacggtacgcattagaccctcaatgcgctcgcaaccattgagcaaaatcccgattcttcgacgtctccgagcaatttgcgacagaacatggactgagccattgccagtcggggtattcctcattcgccaccccgaaggtctcttcctcatggacaccgggcaatctccatgctgcaacgacgccggatatctcccacgactggctattttgaacggcttcctaagcgaattcatcatcgagcaccaagacggagtccttgagcaacttcacaagctcggaatcaaggcgactgacctcaaagccgtgattctgacccacctgcacaacgaccacgcgggcggattagaggatctggttgcggaggcacctgacctacctatctacatcagccgtgagcactggaatgcttttggggaacatcctctctttgcaagcatggagggagccacacccaatcattggccaaaggggttctcgccgaagattgtggacctgcaggacagaccacttggaccctggaagcagtcttatcctgtgacagaggatggtagaattgccatcgttgatacgtcgggtcatgttcctgggcatattagtctggtgatttacggcgacggggaagatggacagagtcaggttacatacttcctccctggagacgcaacatatggcttggaccttttggacaaggagcagcccgatgggattaatgacgaccctatgcgtgcttacgaaacgctgaagactatcaagcagtttgctaaggagactgatgtggttgtcttgcctagtcatgacatcaacacacctcgcttgcttgctgagcgagtagtctaccggcctcttgagaaagagtgatcgtgtttcaataccatgtacaatattgtgttatttgagggaggaagctatgtactaatatcggactaatgtatctgaaagggaagaaattggaatattttcgcttttgtaacgaagtagcctgcataatatccgactgcatactgctctatctgtatgaatcctgaaaatctgaagccaccagctccgccgattatggaaacaacagttgccttctccacagggtctactcttagtgcggaaagaaacccgaactcggaccgagctcactgtggcaaagccgataccgactgccgacttccatctagcggcgcaaagccagtggcgaaatcatggccgaaagaacatgagccgctcgccacccggttttcggtaagaacccgtggaaatcaataattaagcataacctgaaacaataggagattagaatagccggagatttaacatattcagaatccctataacgtagcatataacgcttcacaacccaaaattccaccgtgacataaaagctcattgtaatagtcagagcgacaggcgggcaagggggatcagttgtatcgtcatttctgaaagccggaggatggaatatccgtagcctgacccataataccgagagcgacaaggcgaaggccctcgtcgtaaagggattcgagatagtgtaggcggatatctgagatctagcgagtcttgaaacagcctttcatggtacctgtgcgatatttgccacgacggactactaggagaacttctggacgaaattctggtccatagagatcgggtatacgtaaggtaaagtagttagcaacatgcaagagaagagaaagatgatatgaaggattggcaaaactaggtgagaggaaaaatatatatcgaaggggatggcagccatcaatcaagtcatgtagctggaccagttctaagacccttctcgacgacctcaatatctcggagcagttcctccgcggattcgtattccttcaaccaacacttccaagtaatagcactgcacgcatgtgaatcccgtgggaactgctgcttttcaaacctctgttcataccacccatcttccccatcgacaatgtcaggaaacaccgaataccccatcatgatcaagtagatagtacaacccagcgcaaagagatctgttttgacatccgcatcaaaaggatcggcccgagggcaataggatctgacgggctccccgcttccatcaagcagtactgttccatcgctcgatagttgtttcccttggaaatccgacagcttgatatgaagatcctcatcgaggagaatatttccaggccggatattgcagtgaatgatgccctgagcatggatccatgcaactgcctcggtagcctctcgacaccaggataactgctgctggatcgaagggggggtgttgtctgattcgaggagatagtagcctaaggttccgtttacagctcgctcgaggtagagccccttgtcggagaagcccctgaatcctatgatcgttcatgggacccgacaatttcgaaaagctttttctcgagatttcgagccgactcatgtctccgccaggggcgagaggaagtttcatgaccgtcaaatcatccacttctccaatgaacgcactgcttcccgaggcgatgaccttcttcacccctggggggcagtaatgtctgtgtataataacttctgtgtcgtctaacatggcgagtcgagggaagaaaaatgttatatggaaaaggtttggtaagctcagtatttggggtgatagaattgcgagttgaaagaaaccctacaatgaacagttaaggcgcgtgatgttgctcgggcgggggatggtgcaccggacaatcgaaatgattggctggtattgccagcagaaagttggcttgatcgagtaactagatttcaaggtgtattagcttcttaataatggtttatctcctataatagttaactagataaacaatcggggtcgattctcttctagtgatatgatcacaaaacaaactaaatactgtagtagtacatctatgcgtggacagttaaaagggtatagaaagaaggaaacagtagtagcctctacgtattcgctacacattagatgaaactacatattaggggaattgacgaggcattaaatacattgggatagctaaagtggtaaactgcattcaccgatggcgagatgaattacgcagttgacagcaccatacatattggactcagtacaaaacaatttacctcagctatagtccacgcgcagtacctaatcctcacaccaccagccgaacgaagtccatcccaaaaaatcttcacagttcgtggacatgatcacgtccggccatggccttcctttcatctaagaaccgtcagtcattcaggcacttcgaattttgatctgtttagcatacgtacatatcaacgactttctctaacactttgggcatatatggcccggaaccctgacaaccgaggttgccaagtatacatccttgtatcccgtgcagttgctaccaccgggctgggggcactggaccattgcaatctcttctttttcatgctttggggtagcagtacagttttgatactttctgcgggcaatacgtcgttcgcatccgcaagccatgatgatattcagaccgtaagttgttcttgaccgaaaggcaatagaagttaaagtgtagagccagtggccagaggataattggatgatagtagagcgatagttgagcaaaagctttgtgattctcatgttgacatcggaattatgatgcctttatatattcatctcgcaaagtctccctcgagctgaggggtcagtgcagcttatggtcaacaccattatctagcttgatgaatgaatcacgaccatgtccgcgatgtattgtcttctcccccgcatgatcatattggctatctccctagtgtcatgtaaagtgttgactatgcatctctctcgtcatctagaccggatatagcctctgatacgcctcctccaattacctttcggtattcgacgagctaaagatctgatcatgtacattattggctatgactaagactacgatagaaaaccgaattacagacttttccagttgaattcaacccattccaggaatctccaaatctttccatctagttttattctctttatccggactacagtaacatataggaaagtagaatgattctaagtctaacactgtccgtccacttctctgagaggaacgccttatcagtgctccaagggactctagttctcataaaactgttctcgagagttcttcagttatccattgccccgtatattggtgaatcaacatccttctgcttctctcctttttctacgccgagtcgtatggcctctaagattggataaaccgcatctactccaacataccaaaatattcaacattaagtcctaacatttgactgcgtagacttggttggtcttggttggaattgttttccatatccaattcgtagcagtgccagcctgggggagaaaagtatgtccgctatcctcgccccaccattttgtgcccctcttcgtgagaggaaacagttactaccatcttttacccttcaattcttgagattacgatgcgagatgccttttcatcatttgacagatgctatgcattgatacccgattgacccgactatttgtgattttgaagacttgattgttcctgcctcagaccatacgacgacacacagcccattgcttctcatcaaccaaccgacacatcacaagaggagaaaaaaccaggatatacaaaagctggttacaaggtcctacatcttgcgaactaaaataacacgaggcgaacttttcgccgcggttgtgtacttcagtataatcaatcttatcattcaaagtcagtttctctttagaaaacccaactgttactggaggaattccattattgctcataattggccccgagctaacgtgccacttcagccatgatcgaccaggtgcgcaagtacaagcttgatcctattccacgaggaaatcttacaggggtagtgaaccgaaatgtatgtactctagagttggagactggataatgctaattatttgcagctaaaccgtgacgattgtgaaaatatagaatggactgcccttccgaaagcaacccgaatgaagcctcctccgaaagccatcgccgttattgttgatgtcatagaaagccaaggtgccatccacatcaccgacgatgacggatcatacattgatatggtaggaactgaatttgctggccatttggtgcttgtcccgtgggataaaagctggtttttgagggcatctggatcgattgaagtgggatatgttatcgtttaggagaggacatgatataaatcactcgataactctttgacgatttatgattaaggaatctgtcaactccctagatattgggattgtgacgaaggacgattgatatctgttgtaggggtcggttaggcgcattatgccggtgatttggcctggcatcgccgcgatttttttcagatcgtccatggagacctcataaacatcaccatgaacagaggtaagggtggcgtctttccttggtcagccttagtcacagaggagtaaagatcgtttacctcgagtcactccgtcagctagcttctcaaagacgtcgagctccaattcattccatttttcggacagcttagaaggcaaatatacgcgctcctcatctctcatgttcgcaatggcagaaggtcccaatccagccgcacaaagaacaacccctgtgtcgccgtgcttcttccttatgttccgttgagtctccagatatgttgttctttacttagcacctttcgcatccgttgaaggtcgtccatttgttaggagctgaaaagcatcgtcaactcgcttttgttcagagtctttcagataggtacggtgatgcgttaactttgagaacttcaagagcttcgccacggcctcgtctgcagttaggctttgcgaaggcatctatctgctcttcgttcattaagagataatgaaaatgattatcactggagtatatactgtatgtgggaccaagcttagatgtaatcagaaagaggcgagatctctctagaacaagtgaaaaatgcttgaaggttgttgaaatccgttggcaacagctggaaacagttgtaaagttttggccctgattccagccatgcagaaatccatggaaacttatggaaatgtcgaatcgtcaagaagaccaatcatagtttgaaatgatgaaacaaggaggcagacatggtgcatgaagcctcaaagtatacgacttcagcgatacgcgcggggtaatgagaatatctgatctgaattacctggaactataatggaaattatgattcacagaagacattgctatcgcaagtttctactttatttctttagttgtctcttccaaacaaccccagggccaaacgaatccctccgtccctgtatgcaatcgatggccgccatctgtaatattttaggagctagaaatctgcgattgagcatgtatcaacataatgcttgcgcattccgtcacgcattaacatatagcagacagaagcagatttgtgtgattggcgaggaaagagaaatgttcgttgtttcccagtctatgcgcctgacaaggaaggaaagtcaccttcagcgtgttcacgagcattttgagcattacaaaatctctataaggggactgagactgatagcttataactaaaacggtatgcaataatgttaagattacattttattactgaagttatatagttaggtgtaactagtgaagaggggacccctaaggggcaccgacagccctgtctgcgaaacaggtatgagagcagagtcgtcactgggagtagtagggtgctagagnnnnnnnnnnnnnnnnnnnnttagtttaattaatttaatggcgttttggttgaaatatatgccttagaaaactatactcttgggtggggtggcgactcgtttacagtggcgactcgtttaccgattatgttaatgtattttaccaccgagccgccaccaccaccgagccgccacctcaccctaatatattgaattgaaatgtatatatctctaccaaaacaccattaaattgaatcaactaacaactggtctatctggatatgtttctcttctatgccctggcaatctgtatattccacacccccgggggggccgtgtatgtggctgaatagttgattctctaggtatgctggggccggggggaggtactttaattacttcttgttgctgtataattaatgcagaggcttcttgaactgaaaggccttcttcggtgggtatttgcctctgggatctagtatgcttttgcttctgcttctcgttggcggtgtgtaattccttgttttctttggcgagtaggatagtaccttgtattataagacggaagccttttataagctggtttaatgtacgatctgacgggctaggtaggcttcgagatcttatataaagtagagctttaattaataaagcctgccgatatagatctttctctgtaactagtgtttttggtataaaatttcgacttgattcgctttcccggctaggggggggggttagggttcgaagctgaatattaagctttgaaatcactctttctaggttaaaagggactaaaccagctattctaaagctattcttaattgtctccgatttaaaagctttaattcgtataagagggtatactttaaggaagtcaagtttattaatataattaaacccgttctgtatcttgattttaactatccgaccgtaggtatattttaataccgcaaaataactaatatctagaggttataaaagataagataaatgcgctggtatatagattagtatcaccttattttacttataaatttcgttaaatttaggtattaaataacttctgtggctattaagaattaaaagccggtataccccctttatacgcgaagtactaggaataaagagcttcttaagctaacgaagtctaatcttatcagaggtctagctattaggactaactttaaagcgctaatcctctaggaggctgttaaactaagatttaataaagactttgcctttaaaaatcatatatagaggaagtgcctacctagaagtattcgtacattcaattgtagttacctactcgcgatttctaggttataaaagtgatctctaaccgtagtatttacttctagttataacctttactgttatagtcaatcctatagtaaaacctatcttattaaagttataaatgttatctagatcaattctatactaaagaatagttttttgaactagattaaactactccccaatgattttagggtcttcgcatttcgtatacttgtaattatactgtttcgagaattaggaggagaggagaggatatcgttttacaaatttcgtaacccaattttagctaactgaaagaactggggtagttccacacttttgaagaagaaggtccgccatttcttatactatagagggcctaggggctgctctacgtagatctatagagagaatccattttttaagagattcttccttagtctctgttaatttatatgaatttgcgcgtgtaatgcttcgttcggtatggccgtcaagacgattgtatagggtagaacggggtatattgaaagtacaggcagtggcagtaatagtacgaatttcttgcttcttaatagcctaaatagctaataaaagcctaccctcttgctctattgaatttttagagctttaggagcgaattggtggcatagtgggtggttgaagaagaagggattaaattaattgacgcgttttgggtgaggtggcggctcggtggtggtggcggctcggtggtgaaatacgttaacgtaattcacatacgagccgccactacatacgacccgccatccnnnnnnnnnnnnnnnnnnnnnnnnnnnnnnnnnnnnnnnnnnnnnnnnnnnnnnnnnnnnnnnnnnnnnnnnnnnnnnnnnnnnnnnnnnnnnnnnnnnnnnnnnnnnnnnnnnnnnnnnnnnnnnnnnnnnnnnnnnnnnnnnnnnnnnnnnnnnnnnnnnnnnnnnnnnnnnnnnnnnnnnnnnnnnnnnnnnnnnnnnnnnnnnnnnnnnnnnnnnnnnnnnnnnnnnnnnnnnnnnnnnnnnnnnnnnnnnnnnnnnnnnnnnnnnnnnnnnnnnnnnnnnnnnnnnnnnnnnnnnnnnnnnnnnnnnnnnnnnnnnnnnnnnnnnnnnnnnnnnnnnnnnnnnnnnnnnnnnnnnnnnnnnnnnnnnnnnnnnnnnnnnnnnnnnnnnnnnnnnnnnnnnnnnnnnnnnnnnnnnnnnnnnnnnnnnnnnnnnnnnnnnnnnnnnnnnnnnnnnnnnnnnnnnnnnnnnnnnnnnnnnnnnnnnnnnnnnnnnnnnnnnnnnnnnnnnnnnnnnnnnnnnnnnnnnnnnnnnnnnnnnnnnnnnnnnnnnnnnnnnnnnnnnnnnnnnnnnnnnnnnnnnnnnnnnnnnnnnnnnnnnnnnnnnnnnnnnnnnnnnnnnnnnnnnnnnnnnnnnnnnnnnnnnnnnnnnnnnnnnnnnnnnnnnnnnnnnnnnnnnnnnnnnnnnnnnnnnnnnnnnnnnnnnnnnnnnnnnnnnnnnnnnnnnnnnnnnnnnnnnnnnnnnnnnnnnnnnnnnnnnnnnnnnnnnnnnnnnnnnnnnnnnnnnnnnnnnnnnnnnnnnnnnnnnnnnnnnnnnnnnnnnnnnnnnnnnnnnnnnnnnnnnnnnnnnnnnnnnnnnnnnnnnnnnnnnnnnnnnnnnnnnnnnnnnnnnnnnnnnnnnnnnnnnnnnnnnnnnnnnnnnnnnnnnnnnnnnnnnnnnnnnnnnnnnnnnnnnnnnnnnnnnnnnnnnnnnnnnnnnnnnnnnnnnnnnnnnnnnnnnnnnnnnnnnnnnnnnnnnnnnnnnnnnnnnnnnnnnnnnnnnnnnnnnnnnnnnnnnnnnnnnnnnnnnnnnnnnnnnnnnnnnnnnnnnnnnnnnnnnnnnnnnnnnnnnnnnnnnnnnnnnnnnnnnnnnnnnnnnnnnnnnnnnnnnnnnnnnnnnnnnnnnnnnnnnnnnnnnnnnnnnnnnnnnnnnnnnnnnnnnnnnnnnnnnnnnnnnnnnnnnnnnnnnnnnnnnnnnnnnnnnnnnnnnnnnnnnnnnnnnnnnnnnnnnnnnnnnnnnnnnnnnnnnnnnnnnnnnnnnnnnnnnnnnnnnnnnnnnnnnnnnnnnnnnnnnnnnnnnnnnnnnnnnnnnnnnnnnnnnnnnnnnnnnnnnnnnnnnnnnnnnnnnnnnnnnnnnnnnnnnnnnnnnnnnnnnnnnnnnnnnnnnnnnnnnnnnnnnnnnnnnnnnnnnnnnnnnnnnnnnnnnnnnnnnnnnnnnnnnnnnnnnnnnnnnnnnnnnnnnnnnnnnnnnnnnnnnnnnnnnnnnnnnnnnnnnnnnnnnnnnnnnnnnnnnnnnnnnnnnnnnnnnnnnnnnnnnnnnnnnnnnnnnnnnnnnnnnnnnnnnnnnnnnnnnnnnnnnnnnnnnnnnnnnnnnnnnnnnnnnnnnnnnnnnnnnnnnnnnnnnnnnnnnnnnnnnnnnnnnnnnnnnnnnnnnnnnnnnnnnnnnnnnnnnnnnnnnnnnnnnnnnnnnnnnnnnnnnnnnnnnnnnnnnnnnnnnnnnnnnnnnnnnnnnnnnnnnnnnnnnnnnnnnnnnnnnnnnnnnnnnnnnnnnnnnnnnnnnnnnnnnnnnnnnnnnnnnnnnnnnnnnnnnnnnnnnnnnnnnnnnnnnnnnnnnnnnnnnnnnnnnnnnnnnnnnnnnnnnnnnnnnnnnnnnnnnnnnnnnnnnnnnnnnnnnnnnnnnnnnnnnnnnnnnnnnnnnnnnnnnnnnnnnnnnnnnnnnnnnnnnnnnnnnnnnnnnnnnnnnnnnnnnnnnnnnnnnnnnnnnnnnnnnnnnnnnnnnnnnnnnnnnnnnnnnnnnnnnnnnnnnnnnnnnnnnnnnnnnnnnnnnnnnnnnnnnnnnnnnnnnnnnnnnnnnnnnnnnnnnnnnnnnnnnnnnnnnnnnnnnnnnnnnnnnnnnnnnnnnnnnnnnnnnnnnnnnnnnnnnnnnnnnnnnnnnnnnnnnnnnnnnnnnnnnnnnnnnnnnnnnnnnnnnnnnnnnnnnnnnnnnnnnnnnnnnnnnnnnnnnnnnnnnnnnnnnnnnnnnnnnnnnnnnnnnnnnnnnnnnnnnnnnnnnnnnnnnnnnnnnnnnnnnnnnnnnnnnnnnnnnnnnnnnnnnnnnnnnnnnnnnnnnnnnnnnnnnnnnnnnnnnnnnnnnnnnnnnnnnnnnnnnnnnnnnnnnnnnnnnnnnnnnnnnnnnnnnnnnnnnnnnnnnnnnnnnnnnnnnnnnnnnnnnnnnnnnnnnnnnnnnnnnnnnnnnnnnnnnnnnnnnnnnnnnnnnnnnnnnnnnnnnnnnnnnnnnnnnnnnnnnnnnnnnnnnnnnnnnnnnnnnnnnnnnnnnnnnnnnnnnnnnnnnnnnnnnnnnnnnnnnnnnnnnnnnnnnnnnnnnnnnnnnnnnnnnnnnnnnnnnnnnnnnnnnnnnnnnnnnnnnnnnnnnnnnnnnnnnnnnnnnnnnnnnnnnnnnnnnnnnnnnnnnnnnnnnnnnnnnnnnnnnnnnnnnnnnnnnnnnnnnnnnnnnnnnnnnnnnnnnnnnnnnnnnnnnnnnnnnnnnnnnnnnnnnnnnnnnnnnnnnnnnnnnnnnnnnnnnnnnnnnnnnnnnnnnnnnnnnnnnnnnnnnnnnnnnnnnnnnnnnnnnnnnnnnnnnnnnnnnnnnnnnnnnnnnnnnnnnnnnnnnnnnnnnnnnnnnnnnnnnnnnnnnnnnnnnnnnnnnnnnnnnnnnnnnnnnnnnnnnnnnnnnnnnnnnnnnnnnnnnnnnnnnnnnnnnnnnnnnnnnnnnnnnnnnnnnnnnnnnnnnnnnnnnnnnnnnnnnnnnnnnnnnnnnnnnnnnnnnnnnnnnnnnnnnnnnnnnnnnnnnnnnnnnnnnnnnnnnnnnnnnnnnnnnnnnnnnnnnnnnnnnnnnnnnnnnnnnnnnnnnnnnnnnnnnnnnnnnnnnnnnnnnnnnnnnnnnnnnnnnnnnnnnnnnnnnnnnnnnnnnnnnnnnnnnnnnnnnnnnnnnnnnnnnnnnnnnnnnnnnnnnnnnnnnnnnnnnnnnnnnnnnnnnnnnnnnnnnnnnnnnnnnnnnnnnnnnnnnnnnnnnnnnnnnnnnnnnnnnnnnnnnnnnnnnnnnnnnnnnnnnnnnnnnnnnnnnnnnnnnnnnnnnnnnnnnnnnnnnnnnnnnnnnnnnnnnnnnnnnnnnnnnnnnnnnnnnnnnnnnnnnnnnnnnnnnnnnnnnnnnnnnnnnnnnnnnnnnnnnnnnnnnnnnnnnnnnnnnnnnnnnnnnnnnnnnnnnnnnnnnnnnnnnnnnnnnnnnnnnnnnnnnnnnnnnnnnnnnnnnnnnnnnnnnnnnnnnnnnnnnnnnnnnnnnnnnnnnnnnnnnnnnnnnnnnnnnnnnnnnnnnnnnnnnnnnnnnnnnnnnnnnnnnnnnnnnnnnnnnnnnnnnnnnnnnnnnnnnnnnnnnnnnnnnnnnnnnnnnnnnnnnnnnnnnnnnnnnnnnnnnnnnnnnnnnnnnnnnnnnnnnnnnnnnnnnnnnnnnnnnnnnnnnnnnnnnnnnnnnnnnnnnnnnnnnnnnnnnnnnnnnnnnnnnnnnnnnnnnnnnnnnnnnnnnnnnnnnnnnnnnnnnnnnnnnnnnnnnnnnnnnnnnnnnnnnnnnnnnnnnnnnnnnnnnnnnnnnnnnnnnnnnnnnnnnnnnnnnnnnnnnnnnnnnnnnnnnnnnnnnnnnnnnnnnnnnnnnnnnnnnnnnnnnnnnnnnnnnnnnnnnnnnnnnnnnnnnnnnnnnnnnnnnnnnnnnnnnnnnnnnnnnnnnnnnnnnnnnnnnnnnnnnnnnnnnnnnnnnnnnnnnnnnnnnnnnnnnnnnnnnnnnnnnnnnnnnnnnnnnnnnnnnnnnnnnnnnnnnnnnnnnnnnnnnnnnnnnnnnnnnnnnnnnnnnnnnnnnnnnnnnnnnnnnnnnnnnnnnnnnnnnnnnnnnnnnnnnnnnnnnnnnnnnnnnnnnnnnnnnnnnnnnnnnnnnnnnnnnnnnnnnnnnnnnnnnnnnnnnnnnnnnnnnnnnnnnnnnnnnnnnnnnnnnnnnnnnnnnnnnnnnnnnnnnnnnnnnnnnnnnnnnnnnnnnnnnnnnnnnnnnnnnnnnnnnnnnnnnnnnnnnnnnnnnnnnnnnnnnnnnnnnnnnnnnnnnnnnnnnnnnnnnnnnnnnnnnnnnnnnnnnnnnnnnnnnnnnnnnnnnnnnnnnnnnnnnnnnnnnnnnnnnnnnnnnnnnnnnnnnnnnnnnnnnnnnnnnnnnnnnnnnnnnnnnnnnnnnnnnnnnnnnnnnnnnnnnnnnnnnnnnnnnnnnnnnnnnnnnnnnnnnnnnnnnnnnnnnnnnnnnnnnnnnnnnnnnnnnnnnnnnnnnnnnnnnnnnnnnnnnnnnnnnnnnnnnnnnnnnnnnnnnnnnnnnnnnnnnnnnnnnnnnnnnnnnnnnnnnnnnnnnnnnnnnnnnnnnnnnnnnnnnnnnnnnnnnnnnnnnnnnnnnnnnnnnnnnnnnnnnnnnnnnnnnnnnnnnnnnnnnnnnnnnnnnnnnnnnnnnnnnnnnnnnnnnnnnnnnnnnnnnnnnnnnnnnnnnnnnnnnnnnnnnnnnnnnnnnnnnnnnnnnnnnnnnnnnnnnnnnnnnnnnnnnnnnnnnnnnnnnnnnnnnnnnnnnnnnnnnnnnnnnnnnnnnnnnnnnnnnnnnnnnnnnnnnnnnnnnnnnnnnnnnnnnnnnnnnnnnnnnnnnnnnnnnnnnnnnnnnnnnnnnnnnnnnnnnnnnnnnnnnnnnnnnnnnnnnnnnnnnnnnnnnnnnnnnnnnnnnnnnnnnnnnnnnnnnnnnnnnnnnnnnnnnnnnnnnnnnnnnnnnnnnnnnnnnnnnnnnnnnnnnnnnnnnnnnnnnnnnnnnnnnnnnnnnnnnnnnnnnnnnnnnnnnnnnnnnnnnnnnnnnnnnnnnnnnnnnnnnnnnnnnnnnnnnnnnnnnnnnnnnnnnnnnnnnnnnnnnnnnnnnnnnnnnnnnnnnnnnnnnnnnnnnnnnnnnnnnnnnnnnnnnnnnnnnnnnnnnnnnnnnnnnnnnnnnnnnnnnnnnnnnnnnnnnnnnnnnnnnnnnnnnnnnnnnnnnnnnnnnnnnnnnnnnnnnnnnnnnnnnnnnnnnnnnnnnnnnnnnnnnnnnnnnnnnnnnnnnnnnnnnnnnnnnnnnnnnnnnnnnnnnnnnnnnnnnnnnnnnnnnnnnnnnnnnnnnnnnnnnnnnnnnnnnnnnnnnnnnnnnnnnnnnnnnnnnnnnnnnnnnnnnnnnnnnnnnnnnnnnnnnnnnnnnnnnnnnnnnnnnnnnnnnnnnnnnnnnnnnnnnnnnnnnnnnnnnnnnnnnnnnnnnnnnnnnnnnnnnnnnnnnnnnnnnnnnnnnnnnnnnnnnnnnnnnnnnnnnnnnnnnnnnnnnnnnnnnnnnnnnnnnnnnnnnnnnnnnnnnnnnnnnnnnnnnnnnnnnnnnnnnnnnnnnnnnnnnnnnnnnnnnnnnnnnnnnnnnnnnnnnnnnnnnnnnnnnnnnnnnnnnnnnnnnnnnnnnnnnnnnnnnnnnnnnnnnnnnnnnnnnnnnnnnnnnnnnnnnnnnnnnnnnnnnnnnnnnnnnnnnnnnnnnnnnnnnnnnnnnnnnnnnnnnnnnnnnnnnnnnnnnnnnnnnnnnnnnnnnnnnnnnnnnnnnnnnnnnnnnnnnnnnnnnnnnnnnnnnnnnnnnnnnnnnnnnnnnnnnnnnnnnnnnnnnnnnnnnnnnnnnnnnnnnnnnnnnnnnnnnnnnnnnnnnnnnnnnnnnnnnnnnnnnnnnnnnnnnnnnnnnnnnnnnnnnnnnnnnnnnnnnnnnnnnnnnnnnnnnnnnnnnnnnnnnnnnnnnnnnnnnnnnnnnnnnnnnnnnnnnnnnnnnnnnnnnnnnnnnnnnnnnnnnnnnnnnnnnnnnnnnnnnnnnnnnnnnnnnnnnnnnnnnnnnnnnnnnnnnnnnnnnnnnnnnnnnnnnnnnnnnnnnnnnnnnnnnnnnnnnnnnnnnnnnnnnnnnnnnnnnnnnnnnnnnnnnnnnnnnnnnnnnnnnnnnnnnnnnnnnnnnnnnnnnnnnnnnnnnnnnnnnnnnaataaagaatagggacttcttagttatatcctaagggagtattaatactataaaatctactatcggtaggtattctaactaattatcctagttctattctatatagggttataatcgctacgctatatactagttagcaatttcactttatctatctgtctaagggtaatatatggttaataactttctttttatacctaggatttaatagaacttagtctagaattctaagataaactaacctccttaatcagagataattatatctaggattcctgtgatctaaataatataatctacaaataagtatactatagcttttatatctatttccttctaataaggaattaatattagtcgcttacttaaacggtctactactataaatatagtattatatctgtagtaatcttttaggaaagatctaaaatctattataatatattactatagttattccggtactagtagggaatatagtagtcctaaagtataatctctctatacctttattcttttataaattaagtagttattaacgtaatacttaatatctgttatctatcctagctaataatattattctaataccaatttctttagcttcttaattcctaggtatataattaacagttattaatatatctcattaagaagccttatataaagatctcctttattaggaacctcgagttagttcttaaaaagtaatagtctattataaagtatctactttagattacttccttcaatagctatctatcggaatagtttaagtttagtattttattagttagcttattttatatagtttataatcttaggatcttctagtttaattagtaagagctctataagatatacacctttcttaaagtatttgacggaaaaacggtggtaaggcgagtgtattttgtggcagaaaaatcttaataaattctctaactctctaaaactgacaatagtcctaaaacatgacaatctgatggacaacttagtaatcaaaacaaacaaaacaannnnnnnnnnnnnnnnnnnnnnnnnnnnnnnnnnnnnnnnnnnnnnnnnnnnnnnnnnnnnnnnnnnnnnnnnnnnnnnnnnnnnnnnnnnnnnnnnnnnnnnnnnnnnnnnnnnnnnnnnnnnnnnnnnnnnnnnnnnnnnnnnnnnnnnnnnnnnnnnnnnnnnnnnnnnnnnnnnnnnnnnnnnnnnnnnnnnnnnnnnnnnnnnnnnnnnnnnnnnnnnnnnnnnnnnnnnnnnnnnnnnnnnnnnnnnnnnnnnnnnnnnnnnnnnnnnnnnnnnnnnnnnnnnnnnnnnnnnnnnnnnnnnnnnnnnnnnnnnnnnnnnnnnnnnnnnnnnnnnnnnnnnnnnnnnnnnnnnnnnnnnnnnnnnnnnnnnnnnnnnnnnnnnnnnnnnnnnnnnnnnnnnnnnnnnnnnnnnnnnnnnnnnnnnnnnnnnnnnnnnnnnnnnnnnnnnnnnnnnnnnnnnnnnnnnnnnnnnnnnnnnnnnnnnnnnnnnnnnnnnnnnnnnnnnnnnnnnnnnnnnnnnnnnnnnnnnnnnnnnnnnnnnnnnnnnnnnnnnnnnnnnnnnnnnnnnnnnnnnnnnnnnnnnnnnnnnnnnnnnnnnnnnnnnnnnnnnnnnnnnnnnnnnnnnnnnnnnnnnnnnnnnnnnnnnnnnnnnnnnnnnnnnnnnnnnnnnnnnnnnnnnnnnnnnnnnnnnnnnnnnnnnnnnnnnnnnnnnnnnnnnnnnnnnnnnnnnnnnnnnnnnnnnnnnnnnnnnnnnnnnnnnnnnnnnnnnnnnnnnnnnnnnnnnnnnnnnnnnnnnnnnnnnnnnnnnnnnnnnnnnnnnnnnnnnnnnnnnnnnnnnnnnnnnnnnnnnnnnnnnnnnnnnnnnnnnnnnnnnnnnnnnnnnnnnnnnnnnnnnnnnnnnnnnnnnnnnnnnnnnnnnnnnnnnnnnnnnnnnnnnnnnnnnnnnnnnnnnnnnnnnnnnnnnnnnnnnnnnnnnnnnnnnnnnnnnnnnnnnnnnnnnnnnnnnnnnnnnnnnnnnnnnnnnnnnnnnnnnnnnnnnnnnnnnnnnnnnnnnnnnnnnnnnnnnnnnnnnnnnnnnnnnnnnnnnnnnnnnnnnnnnnnnnnnnnnnnnnnnnnnnnnnnnnnnnnnnnnnnnnnnnnnnnnnnnnnnnnnnnnnnnnnnnnnnnnnnnnnnnnnnnnnnnnnnnnnnnnnnnnnnnnnnnnnnnnnnnnnnnnnnnnnnnnnnnnnnnnnnnnnnnnnnnnnnnnnnnnnnnnnnnnnnnnnnnnnnnnnnnnnnnnnnnnnnnnnnnnnnnnnnnnnnnnnnnnnnnnnnnnnnnnnnnnnnnnnnnnnnnnnnnnnnnnnnnnnnnnnnnnnnnnnnnnnnnnnnnnnnnnnnnnnnnnnnnnnnnnnnnnnnnnnnnnnnnnnnnnnnnnnnnnnnnnnnnnnnnnnnnnnnnnnnnnnnnnnnnnnnnnnnnnnnnnnnnnnnnnnnnnnnnnnnnnnnnnnnnnnnnnnnnnnnnnnnnnnnnnnnnnnnnnnnnnnnnnnnnnnnnnnnnnnnnnnnnnnnnnnnnnnnnnnnnnnnnnnnnnnnnnnnnnnnnnnnnnnnnnnnnnnnnnnnnnnnnnnnnnnnnnnnnnnnnnnnnnnnnnnnnnnnnnnnnnnnnnnnnnnnnnnnnnnnnnnnnnnnnnnnnnnnnnnnnnnnnnnnnnnnnnnnnnnnnnnnnnnnnnnnnnnnnnnnnnnnnnnnnnnnnnnnnnnnnnnnnnnnnnnnnnnnnnnnnnnnnnnnnnnnnnnnnnnnnnnnnnnnnnnnnnnnnnnnnnnnnnnnnnnnnnnnnnnnnnnnnnnnnnnnnnnnnnnnnnnnnnnnnnnnnnnnnnnnnnnnnnnnnnnnnnnnnnnnnnnnnnnnnnnnnnnnnnnnnnnnnnnnnnnnnnnnnnnnnnnnnnnnnnnnnnnnnnnnnnnnnnnnnnnnnnnnnnnnnnnnnnnnnnnnnnnnnnnnnnnnnnnnnnnnnnnnnnnnnnnnnnnnnnnnnnnnnnnnnnnnnnnnnnnnnnnnnnnnnnnnnnnnnnnnnnnnnnnnnnnnnnnnnnnnnnnnnnnnnnnnnnnnnnnnnnnnnnnnnnnnnnnnnnnnnnnnnnnnnnnnnnnnnnnnnnnnnnnnnnnnnnnnnnnnnnnnnnnnnnnnnnnnnnnnnnnnnnnnnnnnnnnnnnnnnnnnnnnnnnnnnnnnnnnnnnnnnnnnnnnnnnnnnnnnnnnnnnnnnnnnnnnnnnnnnnnnnnnnnnnnnnnnnnnnnnnnnnnnnnnnnnnnnnnnnnnnnnnnnnnnnnnnnnnnnnnnnnnnnnnnnnnnnnnnnnnnnnnnnnnnnnnnnnnnnnnnnnnnnnnnnnnnnnnnnnnnnnnnnnnnnnnnnnnnnnnnnnnnnnnnnnnnnnnnnnnnnnnnnnnnnnnnnnnnnnnnnnnnnnnnnnnnnnnnnnnnnnnnnnnnnnnnnnnnnnnnnnnnnnnnnnnnnnnnnnnnnnnnnnnnnnnnnnnnnnnnnnnnnnnnnnnnnnnnnnnnnnnnnnnnnnnnnnnnnnnnnnnnnnnnnnnnnnnnnnnnnnnnnnnnnnnnnnnnnnnnnnnnnnnnnnnnnnnnnnnnnnnnnnnnnnnnnnnnnnnnnnnnnnnnnnnnnnnnnnnnnnnnnnnnnnnnnnnnnnnnnnnnnnnnnnnnnnnnnnnnnnnnnnnnnnnnnnnnnnnnnnnnnnnnnnnnnnnnnnnnnnnnnnnnnnnnnnnnnnnnnnnnnnnnnnnnnnnnnnnnnnnnnnnnnnnnnnnnnnnnnnnnnnnnnnnnnnnnnnnnnnnnnnnnnnnnnnnnnnnnnnnnnnnnnnnnnnnnnnnnnnnnnnnnnnnnnnnnnnnnnnnnnnnnnnnnnnnnnnnnnnnnnnnnnnnnnnnnnnnnnnnnnnnnnnnnnnnnnnnnnnnnnnnnnnnnnnnnnnnnnnnnnnnnnnnnnnnnnnnnnnnnnnnnnnnnnnnnnnnnnnnnnnnnnnnnnnnnnnnnnnnnnnnnnnnnnnnnnnnnnnnnnnnnnnnnnnnnnnnnnnnnnnnnnnnnnnnnnnnnnnnnnnnnnnnnnnnnnnnnnnnnnnnnnnnnnnnnnnnnnnnnnnnnnnnnnnnnnnnnnnnnnnnnnnnnnnnnnnnnnnnnnnnnnnnnnnnnnnnnnnnnnnnnnnnnnnnnnnnnnnnnnnnnnnnnnnnnnnnnnnnnnnnnnnnnnnnnnnnnnnnnnnnnnnnnnnnnnnnnnnnnnnnnnnnnnnnnnnnnnnnnnnnnnnnnnnnnnnnnnnnnnnnnnnnnnnnnnnnnnnnnnnnnnnnnnnnnnnnnnnnnnnnnnnnnnnnnnnnnnnnnnnnnnnnnnnnnnnnnnnnnnnnnnnnnnnnnnnnnnnnnnnnnnnnnnnnnnnnnnnnnnnnnnnnnnnnnnnnnnnnnnnnnnnnnnnnnnnnnnnnnnnnnnnnnnnnnnnnnnnnnnnnnnnnnnnnnnnnnnnnnnnnnnnnnnnnnnnnnnnnnnnnnnnnnnnnnnnnnnnnnnnnnnnnnnnnnnnnnnnnnnnnnnnnnnnnnnnnnnnnnnnnnnnnnnnnnnnnnnnnnnnnnnnnnnnnnnnnnnnnnnnnnnnnnnnnnnnnnnnnnnnnnnnnnnnnnnnnnnnnnnnnnnnnnnnnnnnnnnnnnnnnnnnnnnnnnnnnnnnnnnnnnnnnnnnnnnnnnnnnnnnnnnnnnnnnnnnnnnnnnnnnnnnnnnnnnnnnnnnnnnnnnnnnnnnnnnnnnnnnnnnnnnnnnnnnnnnnnnnnnnnnnnnnnnnnnnnnnnnnnnnnnnnnnnnnnnnnnnnnnnnnnnnnnnnnnnnnnnnnnnnnnnnnnnnnnnnnnnnnnnnnnnnnnnnnnnnnnnnnnnnnnnnnnnnnnnnnnnnnnnnnnnnnnnnnnnnnnnnnnnnnnnnnnnnnnnnnnnnnnnnnnnnnnnnnnnnnnnnnnnnnnnnnnnnnnnnnnnnnnnnnnnnnnnnnnnnnnnnnnnnnnnnnnnnnnnnnnnnnnnnnnnnnnnnnnnnnnnnnnnnnnnnnnnnnnnnnnnnnnnnnnnnnnnnnnnnnnnnnnnnnnnnnnnnnnnnnnnnnnnnnnnnnnnnnnnnnnnnnnnnnnnnnnnnnnnnnnnnnnnnnnnnnnnnnnnnnnnnnnnnnnnnnnnnnnnnnnnnnnnnnnnnnnnnnnnnnnnnnnnnnnnnnnnnnnnnnnnnnnnnnnnnnnnnnnnnnnnnnnnnnnnnnnnnnnnnnnnnnnnnnnnnnnnnnnnnnnnnnnnnnnnnnnnnnnnnnnnnnnnnnnnnnnnnnnnnnnnnnnnnnnnnnnnnnnnnnnnnnnnnnnnnnnnnnnnnnnnnnnnnnnnnnnnnnnnnnnnnnnnnnnnnnnnnnnnnnnnnnnnnnnnnnnnnnnnnnnnnnnnnnnnnnnnnnnnnnnnnnnnnnnnnnnnnnnnnnnnnnnnnnnnnnnnnnnnnnnnnnnnnnnnnnnnnnnnnnnnnnnnnnnnnnnnnnnnnnnnnnnnnnnnnnnnnnnnnnnnnnnnnnnnnnnnnnnnnnnnnnnnnnnnnnnnnnnnnnnnnnnnnnnnnnnnnnnnnnnnnnnnnnnnnnnnnnnnnnnnnnnnnnnnnnnnnnnnnnnnnnnnnnnnnnnnnnnnnnnnnnnnnnnnnnnnnnnnnnnnnnnnnnnnnnnnnnnnnnnnnnnnnnnnnnnnnnnnnnnnnnnnnnnnnnnnnnnnnnnnnnnnnnnnnnnnnnnnnnnnnnnnnnnnnnnnnnnnnnnnnnnnnnnnnnnnnnnnnnnnnnnnnnnnnnnnnnnnnnnnnnnnnnnnnnnnnnnnnnnnnnnnnnnnnnnnnnnnnnnnnnnnnnnnnnnnnnnnnnnnnnnnnnnnnnnnnnnnnnnnnnnnnnnnnnnnnnnnnnnnnnnnnnnnnnnnnnnnnnnnnnnnnnnnnnnnnnnnnnnnnnnnnnnnnnnnnnnnnnnnnnnnnnnnnnnnnnnnnnnnnnnnnnnnnnnnnnnnnnnnnnnnnnnnnnnnnnnnnnnnnnnnnnnnnnnnnnnnnnnnnnnnnnnnnnnnnnnnnnnnnnnnnnnnnnnnnnnnnnnnnnnnnnnnnnnnnnnnnnnnnnnnnnnnnnnnnnnnnnnnnnnnnnnnnnnnnnnnnnnnnnnnnnnnnnnnnnnnnnnnnnnnnnnnnnnnnnnnnnnnnnnnnnnnnnnnnnnnnnnnnnnnnnnnnnnnnnnnnnnnnnnnnnnnnnnnnnnnnnnnnnnnnnnnnnnnnnnnnnnnnnnnnnnnnnnnnnnnnnnnnnnnnnnnnnnnnnnnnnnnnnnnnnnnnnnnnnnnnnnnnnnnnnnnnnnnnnnnnnnnnnnnnnnnnnnnnnnnnnnnnnnnnnnnnnnnnnnnnnnnnnnnnnnnnnnnnnnnnnnnnnnnnnnnnnnnnnnnnnnnnnnnnnnnnnnnnnnnnnnnnnnnnnnnnnnnnnnnnnnnnnnnnnnnnnnnnnnnnnnnnnnnnnnnnnnnnnnnnnnnnnnnnnnnnnnnnnnnnnnnnnnnnnnnnnnnnnnnnnnnnnnnnnnnnnnnnnnnnnnnnnnnnnnnnnnnnnnnnnnnnnnnnnnnnnnnnnnnnnnnnnnnnnnnnnnnnnnnnnnnnnnnnnnnnnnnnnnnnnnnnnnnnnnnnnnnnnnnnnnnnnnnnnnnnnnnnnnnnnnnnnnnnnnnnnnnnnnnnnnnnnnnnnnnnnnnnnnnnnnnnnnnnnnnnnnnnnnnnnnnnnnnnnnnnnnnnnnnnnnnnnnnnnnnnnnnnnnnnnnnnnnnnnnnnnnnnnnnnnnnnnnnnnnnnnnnnnnnnnnnnnnnnnnnnnnnnnnnnnnnnnnnnnnnnnnnnnnnnnnnnnnnnnnnnnnnnnnnnnnnnnnnnnnnnnnnnnnnnnnnnnnnnnnnnnnnnnnnnnnnnnnnnnnnnnnnnnnnnnnnnnnnnnnnnnnnnnnnnnnnnnnnnnnnnnnnnnnnnnnnnnnnnnnnnnnnnnnnnnnnnnnnnnnnnnnnnnnnnnnnnnnnnnnnnnnnnnnnnnnnnnnnnnnnnnnnnnnnnnnnnnnnnnnnnnnnnnnnnnnnnnnnnnnnnnnnnnnnnnnnnnnnnnnnnnnnnnnnnnnnnnnnnnnnnnnnnnnnnnnnnnnnnnnaactaaatcaaaccactctccaataatccttgggtcttcacatttcgcgcgctcgtaattataacgtcttgagaatcgggatgcaagggtagggtgccgtttaacaaaatgtgtaacccaattttggccaactgaaataaccggggtggttccgcgttgtttaagaagaagatccgccatttctcgtaccatagagggccggggggccgatccacgagaatccatagagattatccattttcgaagagattcctcttcaattgcggtcaatttagtcaagttggcgcgagaagtcgcgcggtgttgtataccactgaggcggtcccgaagggttgaacgcggtacgttaaaagtgcgggcggtagtagaaatattggaaaattcttgattcttaaaagcctggatagctaataagatcctaccctctttctctattgaatctttagaggattgagagcgttttggtggcatggtgggtggttgaattaactaggtgctaattcatggacgcgtttttggatggggtggcgggtcgtatgtggtggcggctcgtatgtgaattacgttatgttgtagttagttagttagttagaaaatggtgctaattaaggcattcaggcatcactaagcccccaaagcgggttttgaacgctggcccttcgtaggctgtcggtaaatgcatctttgatgaaagtcagcctcgctataaataaagtaggagattataggttgtaccggtaggggctgtgggcttggcgtgaggctgagcggagattgctgcctgcagggctgatagatttcagcttcctataaatatttatcaactgcaagatatcctcaaagtcctcacaacccaagtcttcacaaaccatcatggctcccctaaaaatactggtcacgggcaaatcatccgtcacccatgccccagaacttggcaccctcagattctcagtaaagggaaatggctccgagcaagacaaagtcgccaaggaagtgtcaagtctatcgaccaacctacaaacctggatcaaatcagcctttccctctgccgacaatgagcccgatgcccctatgacaaaattctcatccacgagcatcagaacctggacaaagtcaacaggtagacacgaccagcccttgccaaacccataccatgccagtatatcattcaaagccgtcttccgggacttcgcagagttgaaccacgcgatcgaagaattgctggtttatcccaaggtggaaatcgacagcctggattggggtctcaccgacgaaaccggcagacgactggcttcagatgcgcgcaaattggcactgcgcgatgctatccaacaagctgctgattactcggaagtgctcggatgctctgtttccgtggtggaaatttccgaccaacaagcgagtccctacaggactagacaccttttgggtgcttgcaatagtactactccctttggggatgactctccggcgctggacctcacgcctcaggatattgatgtcgaaagccaggttaatgtcacttttgaagctgcgtgagatgtttggcgttgttctttcttcggcccaaccagtggactgtggatattggttgcactagactacatgtttgatttatcaagatcttgaatatgtgatatattcgtattatatgttccaatcctttttgagcctcggttagcattaaagaaagccccgctgaagtccataaagccccgggaatggaatcatgcaaccaacttatagaatcaatgtacgtgtcgtaatcatccacaaagaagttcagcggcagtgtttcaactctagaaccagcacgaagtgtagaaggcagctctagcctctgtgttcttcctatgctggaagtcgattaattcttgccttgcctgagggggctcctaagcttcgaatcgtttttgaacagtcgccctaaaggagaggcaattcttagagtttgaatacgatgtagatatggagaaacagcgtgtcagattcttcagggtcagagtggacggaggggagaaggaggagaggagaggaagagagctactaagtagacaatgtgttccccgcttggtgccttagtcaacagacacccgacagctgactaattagttataatgggggaaagaaaacctgttgcattcactagctaagagagggagagaaaggaagtccaggtggggaagcaagatactatctatatgaggcaaacaacggtctcaacaagttaactttgtgatgaaaccgtatagagatatgctcaagaaacatgtataaggctaggtatgcagctaaattaggaaagagatgtcagcacgttgatgtgcgcttaaatgacggatttcaatagtacttactcgttcggctatacacttgggttgcccccagttgtccaaacgcacttcgccgcctcggtgttgactttcaacgacagtaggtctgggcgggaatagtggccaaccgtatcaatcattgccttggcgtagtcaatatctccgaggttgatatcagcttgcaggatgcattcctccccagcggggggtgcctccacgagagaggctccgtccggtccgaatatcatagagaaccctccactaggctgctcacagaaatcagtaactatcaccacggatggaaagaaaagaagaaaaaaacaaaaataacacagatgagaaaaatgagaattaccgtttggataatccctccttcaaccaggttctgcttttggagactctctctcttgactacctgcgtacaaaccagcacaaaggcctggccctcaatggcgaagaattgactggcattgcgactcgccacgtccgtttcatggaaaggccatttcaaccccttgggctccgggaactccgccggccagctagcgacgtgaatctgcaccccctgcgagtactcgtagaaccgtaggagcggctggaggtgttcccagcagttcaggcctccaatgcgaccaaagggggaatcgaccaccgtttggagagactccgcctggccctcgccccagatagaccgctccacatgggtgggcttgatcttacgccgatggtgcacaatctggccgccggggttgatgaacgactgcgccatgtataagctccccccgtcgcgttcgctgtagccgagcacgatgaatatacccgcttccttgacggcctgacgaatagtatccatttcgggggaatcacggtttagtgaattggccatgtactggtgcataagctccatgttgtccacaacgctgcccgtccacattgtcctatcgagcatggggcgactaggtcagttaatgacctctagtgtgcgcttgcggtggcatcattcccttaccacagatagcccggaatccacacctcggggaaacccaggacattgatgcccttcgcaccagcttcctggattaatgcaacgctctttgcgataccggcggccaggtccagccaggcgggctcggcctggacagcccccacacggactcgagtcatcttgtatgtgttaggtttctaatttggtaagtttactaggatccgacgtggtgaaaaaaaaaacaaaaaaaagagtaatatggtggtatcgatcaggtcgaaccacaagtgcactcgttctatttattatatgagacacatgctttggttatctcctcgatcaatgtctcgcataggcatgcctgtttgagaaagccactccttttttcctttgtatgtaccctgccatgccagctcgggcgaggattcacgctaatgcacatgcacctcctagcctatttggaggtgctgataataccaataccacataatgtacaaatatttactgagtactccgtacagatatattatctttggcgtatgtgcattagcgttctttttcggccggcctggcatggcagggtagcagatttcctcccccacttgttggctttccctgtctatcggcttaccagcgtatgttgtaggtatgagaggccgcggcctccgagctataatccgtccttttgtgggccccagcaccacgagacccatgctagacgaatatagtgcgttacggcaccgtactttcgagattctcctggcgagacgctgagtgagagtagtaatttactaagtccttaactcgacagtaaatctgattccgaatgttaccgtactacatacatatgtatctaactctcctcttcactgatcttgatcgagtattcgttctgtccattttttctatacaccattccttctaaatttcccccgaaagaaccgcaatgacaaccatccaccaggtccccaatgaagctggtgcaaacctcaacatggcgcacttggtgacagtcgacttagcacgcattgtgaccggtgactctcaggagaggcagaaactctacgatgctgctacacgtcctggagcgttttttttggacttcaagcagagcagtgaagctatactcgacgcctcgcagcagttgtatgcgctatcggaccgttattttcaacgtcccctcacagaaaaattgaaggatttccgtgaggatcaacctgcttccagcgaccgtgggtaagaaacactcttctaactcgttgttggcatcagctgaaccgactctatcaaagttacaagagcagtgattgtgatgagacattcgaggtacttatcagccctatccgttgcgggtggcagagactctgctaactatcttcacaagtttgccgatgacgagctcttccgtggtgacctaagactcccgtctattctgcaggatgaaagcgatcgagtccggcaattcaacaagctctgccatgccgccgccatgagtatactttcatcactctctgattccttgggtctggagggcgacggacggtttgaagcgtaccatcagactacagacagcagcgataccggcctcaagctcatatacgagccctcaattgacaaggccactgacgtggtcgagaataagcacaccgatagcgggagcttgaccctcctgttctacgagcagctgggattgcatgtctaccttcccgagcaggaccgatgggactttgcagcggtccctaagcccgggtgcgccctcgtcaccgtggccgactccctgcgacgcttatcagacttgaaattccactcgccgctgcatcgtgtcacgcagcccagggacggggctgtgaagcggtattttctatcatactttcttcgcccttcccacaccgccaaggccgcatagggccaagggccaccgagttgttaaccgatttggcccagcagctcggcaccaggttgaacagatagttttgtaggacttagcaacaattatcgttacttttgccaacctatgacctatgggttacatccctgtagatacatatatgctctacgtactccgtagtatttatagtctgtcatgtgaatttattataaacacactggtgcttctccatgctaataagctgaccggagttacaggggctgacagagcccgcccgcttggctgcgatccgaacacccgcacggtgcgaatacgcgactggtgcctttattaatcccgtcagacagtgggcatatctcgtcactgaggggagctgtccttagctgaccgtcctggatggttggtgttgttgtgtcgttctcgtcttgcctgcatggccaggctgcccatcgtgccnnnnnnnnnnnnnnnnnnnnnnnnnnnnnnnnnnnnnnnnnnnnnnnnnnnnnnnnnnnnnnnnnnnnnnnnnnnnnnnnnnnnnnnnnnnnnnnnnnnnnnnnnnnnnnnnnnnnnnnnnnnnnnnnnnnnnnnnnnnnnnnnnnnnnnnnnnnnnnnnnnnnnnnnnnnnnnnnnnnnnnnnnnnnnnnnnnnnnnnnnnnnnnnnnnnnnnnnnnnnnnnnnnnnnnnnnnnnnnnnnnnnnnnnnnnnnnnnnnnnnnnntccccatacttgctagctgacccctccctggatggttggtgttgttgtgtcgttctcgtcttgcctgcatggccaggctgcccatcgtgcatttccctcttcagtatcaatataggctgtggaattttatttaattattatataattagtaggtggagagatcaaagttcaaacaatgtgctacttatgagaatttcaagtgcttgtttgaggcctggctgaagctctactctcaacaatcaccggacgcttggttatagatgctcaagactcctaccgtcaaatcgcgcctaccttttccttgcccctgaagaacagcagagctacagtgcatgcggcaacggcaagcgagaaattgaaccattggctggcgtgaagtccctggagtaaggcagataaatcaccctcaactcccctgtggcttatggccctcctttctaccgatatttgcaccacggttgcaatcgtgattccaacggccctgcccacctgcaacacagcagtaatcagcgccgcgccgagggcctgatcttctagaggtaagcactgcaatgtgaaaagattgagtgtcggatggacaatgtcggctcctaatgtagacaacaacatggctgggaagctgtaagcccagtaggtagtcgacggtggtatgggaacggccataaggaggcatgaaatgcccacgcagctgcagctgaaaactaggaggtagtaacccgggacacgggagaggagtttggcggcaatgatattccccacaaatcccatgattcctgtcggtatgaaccgaatagctgtgtctagtggtccgagtcccatatagtcttggtagctaggtaagacatagctgtcagctcttatccatctccagtccctcgaggaagccatgatagggaggtatgacacttacaagtacgtcgcgtagacgaggtagttattgaaagccgcaaacagtgtggccatgatgacctgtgcggcattgaaacggctgttgcggaagatagaaatcctcaagagaggcggcctctccgttttcctgtcaaggtaccatatccacaaggcgaacaagagtaacaaaacgaaggaaagcaggagcgataacagaacccaggacttcgtccatccgacaacgttgccttctgttagagcaaggttaaggagtattatggctccagtcaccaatgtgccgcctacccaatcaacattgaccagaaggtcggagaaagaggaagcctcaacctttgagtgtgggatcaatatttgaccggccacagtgacaattccacagaggatggcggatacccagaatatccatttccagctgacgtactgcgcgatcacaccactaaatatattgcctagcaccgatccgcaggaagacccggccgagtagatagcaaatgcgtagttcttatacttaccgggctggaaagtagcaccgaggatcccgatcgcagtcggaacgttggcagctgcacccagaccttgcaggcctcggaataggtccatgacaatttcgttcggtgcgaacggaaccaggatggtaacgatggtgagccaagcggacccgatgaggaagacggagcgacgtccaaagatgtctgcaaatctaccaaaaaggagcagaaagcagccaaaggaaaggtaataggccgagataatccactgttggcgctcagcaggtatacctaggtctcggccgatactgggaaggatgataactgttgactggacggcgagtgtctgctatatcgtcagcaaaaatgcatgtgatttcggacctagcacctgacttgcattgagaaaggctgctccagccaaggtaagaataagcgggagatgaagcttctgccctgcttccagctcttggaacgattcgatctctggctcgggcttctcgttggaagtattgaaagtaccggcgctaatggcaagcggtttgttgtcggccgacgactccatgatgaaggtggcaccgtgcatgttatcaatactggcaggctgaggctgcgcgccagcgttcccagtggtcttcttcatcgtggcagggaaccccaatagccgtgcgaaagttgaattgccaaggtttgagggcaaaaatgggatacagggtttccctgtataggggaactaaacaagtgaggagattgtaacagagtagactcgggaggcgcaggttcattaggcagtgtgcaggatctatgtgattttcttcttcttctccctgtattttatttcatgctagattggagcataggcacattcaaaatatactatttagtagctaaagatggtaatatgatactagctgcattagcggattttattactgtaggaacaatacccatcttacagggaacttggccgagcaatatggacatgtcacatgcctaatcaggaaccctcggggagatgactgagcagagaccgaataagcgcggcctccggccccgctctgccaatcgttattctatgtattgatatccgagcaccattacgtaggtaccttgcaaacctacactaatcagtcaaaccccatttaaatcatataattgtctgagagaaaacggggttccaaagtggtgagggccttggcattttgggctgtgtaacgtgccatttttgcactatatggttattttattttagggaccagcataatcccgaaaataaagcgaaccaatagacttatattagtcacgtggacggtaggccctaaagcccacttttgaaagggaagtttgtggacccgggggcactatacctaattaggcagccttggcactctttatcgaaaagaaatatggggagccctttttcgaaagtgatcggggtttacggggtttgactgtacaaaatactatagaggatctgcggtgccccgatggactcttaattgcgccgcaaagcccggaaatacagagccattacaatactgttttttttttctctccagtccaatcggtaatttgactaatattgtcttgcgcgagacacccatactagtatgtatgttgtataggtcccgactcaatggtttctcggcatttgtatgggctggcaccaaataaaaccagaaatgctagtaacttatcgaggatcgaccggccactcttcctctgttccgtttacttcatgctcccccttggtatttgctcttttctcactcgaagctattccaccatcttccccagcgttcaaaatccctcgcaccatgggatctgtcgatatccaggagggtgtccaggaatctccccccaaaacgcctctgatcgaggatgccccagacggagggctcacggcatggttgcaagtcctgtgtggccatctgattgtcttcaatgtctggggttacatcacttcctatggcatcttccagtcctactataccacggctctaaatcgcaatgccgcggatatctcctgggtcggttccctacagatcttcttcgtctacttcctaggaacattctccggccgagccatggacgcgggctatctccgcgtcactttggtcacgggcctgttcctacagttgctgggcgtctttatgacctcgctggcgactagctattggcagctactgctctctcaaggtatctgtcagggcatcggggatgggctgctattctgtcctatcgtcgctttgatgtccacctatttcacgcggaagcgcacaatagccatctctatctccgcgtgtggtggagccaccggcggcctggtctttcccgccatcgcgcagaccctcctacaccgcatcggctttccctggactatccgtgtcatgggcttcgtgctcctgttcaatgcagtggttatcatggcctgtgtgcggcagcggctgcctccgcgcaaattaggcccattgatcgagttcaaagcgttcaccaatctttcctacactttcttcgcgttagggacgtttttctgcttctgggccgtctactatgcctattattatgttagttcacccccatctagtgtttccttcctgtcacttttgtggttcatcgtaactgaccaatatgtccaggtccgctcgtttagtcgagatatcataggtgtttctgattacacctccttctccatgttgatgatcatgaacggactaggcttgcctggccgtctaatcccagcgtacctttcggaccggtactgtggtcccgtcaacgcatttattccagtcagcgccatagcggccatcctactatactgctgggctgccattgactcttacgggggtctcacggcctttgctgtggtctacggcttcttcggcggcggtgtgcagagtctctttccatcggcggtagcgagcttgacggatgaaccgagcaaggccggtgtccgtatcgggatgatcttttctattgttagtatcgcctctttgacagggcctccgatcgcaggagccctcatcgatctcgacgggggtcagtatctatatgcgcagctcttcggtgggacatccatgatgataggttgtctcctgcttattatggcgcgatactttaagtgtggcatgaatttgtatcagcggatgtagcgagatgaaaaagagcaaagaaagctcaattgaggggattccgacaggcagcaggggaacagccacgacattatcacggagttcaatgtgggcctaactccaattttgtaatatgatagaagagacaggtactattgatttatggcgattttggttaaaaatgtcacaatctgcgttgtcgtatgtctgcatacgccataggccatattatacacctctagttctcgcccaacatagtcgcacatactccttacgatgttttccggcgctttcaaggcacattccactgaggcgatccgcaggttcctcttgcagagtgcaagaggcacaatttcatcggatttcagaagttgaataggaaaaggctgccaccgagccccgagcatcgtcaggcctcccttgcgcatgaggctccggcattcaataccactcacatgtcttttgaggatggcttgtctctaacgcggtagactagtaatggtggtgcatatcttggaaaaaaaaatatagaatagcgaagaactccttgcgagaaagttatattatgtgaggcgaagcttttccactgcatacagacatgcttcttagactttctatccgaggttctttcacattttgcgataagtattttggaaacctaaagtctcattcgtctatcctcatctcctatcatctattatcacttgtatctcccagattaatctcaacctcctttaatacattgttgttcatcgccctacgaattttgtaacctgcttcaactccaagtggtcatctccatttttagtctctcactcacgcaataaataaccgggcccttgtcgtccttctaccaagtttatcacttaatcaatttgatagctcgacacaatcccgccacggcctttgtgcccaactcttggccccgttgatattcatcatatctttgctctgtaagcttctcgtcctctgcgcaaagcttgaaagccagtcgctcagtccagatgatgcttctcaagtactcctgatccatcagcggcaggagcttagaccttaggacggctccatgcagcgctgaaaatgccgaagcgagtcctaacagcaaagatctattcttgatcggccgcatggagaggtgtaacaaggccacagagaactcacaaggccacaagtcgagcacctgctgaagcgatattggctgtggcagtccggcgtgtttcaccatgtgtagacctatctcgataaggcccacctttgctatccttctggcctcgtccatgccggccacgccagcgtcaacggaagtaaagccgttgtatgctttgaggacacggatgacggccgatatcgtctggttcgctgttcttgaaggcactgtcaccaatccttccaggacacactggtgtgtgaaccaaaacggaagaagtttgggaaggatagtcctggcgtcaggatttgatatcttcaagtcgtagtcagccgcatggatgaagtcgagaccttctaagcttcccgggacaaacagggggtagtgtatgcgaatatcccccctagtaggaggcggaagcgggggaaggtcgtcgaagagcctgaggtaagcctgtgggctcgggttgcacaggttgtcaatccacctcctgacaagatcgacttcggcagaggtgaaggacccaaacatcttgccgccccaagacagctctcgtatcaaacggctattggcactatcgcccggacgtacccatggttttgtcctagctagagccgcgacgaacctctcttggctctgaatcgaagagaaattctcggggatcagccactggccgagtgtctggccatcaagcttgataaggctgggacagtgaatattcccggccgcctgtgccttggctttaaacacttcagcgagcccattgttccactcgttgctagaggttgttggagagacaaattcagggcaagaaagcgcgcttgaaaggcaatagccggcttggactctcctccaggccctttctgccaccccggctccctctgttagttcgacgtgtgcgaggaatttcgcgacgctgttcatcgccatggcagtgtgtcctgaatgggagttatcgatgctgatgtgaaggaaaaagtaatatccactaatacccagctcctcaagctctttggccgccatcatggtctctagcgtaaggagctcgaagtgcatattatatccgagaatctcaggaagaaaatcgtgagggaagagggagatgagaagttgtgaaacggcggctttccatgctaggttattgaccatgccatgccgagggtggatgaaatcggccgagtctggttggggaagggaaattccagcctcccgaaggagctgactgtacaggtggacatggtgcatttccaggttcccatccccgtactcctctgacaagacctgccaagcgtctctagtcacatgtcgtttcccatacggcgtgctgacgcggtggatatgaccaacccaagctccatcgacgagcttaagtggtgccctctgctttatccagtcatgagattcatctcgggtctggaatagctcccgcattcctcccaacttccttctggaaatgtattgctcccattgtacagcgacttgctcatcctgcttcttaataaaggcttgtatggaggctgggctacagcttttcagggacatgattgaatcagctctttttcgctcccaggataccccctcggccaacaaagaaagcaacgtgtcccttgccagtgggaggaattccggataatcctccagattatgaagcttgaagtacattctcatatacagcagtcgcctgtattctgaagaattaaccgaagcggctgatgctaacaatttccttaacaattattcacatccatatgcagtataggggtgtgtggcaagtaacataccaggcaacttcaaatctttagctgaccccaccgacttagcaggttgtcgccgtgctgaaaaacctagaatccagaaagtggcaccacagaggcccaaggcgacaaagataaggtacggaaacatctccgtagaccgagtaaccttgagaggagcaatttcaagttcaaatttccaaacgtgaatgtccgtatttgggtctgtgattctaagaatacacgaatttcgaaattgataggctggtgatataggaaggagaggtccttaatattgtgagctgaaaggacgtggagggcaaagacgggatatcctatacagggaagaactaaaagagtagagcttggaggcgtaggcttatataggatccatttagtcttcttctttccgccgtctttctttcccactagattacagcatagcatcagtaagcacacttaaaatacccatggtgtaggtgtcctgaagtcgcctgcttgctctcctgggattaaaagaaatgactaaaagatagagaaatccaaccatgtctttttaccatatgtaaccaatgaatgtagtccaaggttacctaataatacgtaccgatgtttttttttttgtattatgttgtaaagcctcttacagggaataaaacaaatgattgatgtaacgtatcttgtactgtggtcgagtgaggttaaaaacgaagtctaggcctcgatatgccttttacatattgttgccatatactaccaagggtactttatttagagatttcccttttgggagggaacttttggaggcagagtgtagagtacgccgcaggtgggggcgattgcggcgacggcgctaatacagttcctccgcaaagtttccgtacgaatatatatctccgtacggagacttttgcggaggaactgtagatccctgtggaggttggtgaatctaaagttggaaggagtagttacagggcacgtgcgagggcacggatatcataagtccaccgggcctccgccggcggctcggcccagccccgctcggtcccactcgccctcgcccagcacctcatagtaccatttcacgaaagcagggtgatttcggccgaaatgccgtgactcattctcgacagcatcgccatgtcaactgcttcttacctatatataaaaatttcacccctctcgttgtggcgtacctccgtgcgacctactcgaaagcagtctgaacagtgggtttgctgttttctttcacccatctacaacaacgccctgattacagacctccaaggttgttcaccccagtatggaaggatcctaccccctgcaggcacgcaacacggtacgccgccaccgcgaacgagccaagtacgacttcgagacggttcattccattgtgaacgcgtcacccatcctccacgtgtcctttctgcctacggacccgagtgatgacccctttccaaccatccttcccatgattgggtatatgggctcatttgatggcccatcgactggggctctcgatgtatatcttcatggccatagtgcctcacgtgtcatgcgcttagccggcaaccacggaccggagggaatcccagtctgcatcgcaacaaccctgctcgatggtatcaagctctcgttgacgccctttaacaacagctgtaactaccgcagtgttgtgctgcacggctatgcctcggttgttacggctgaagcagagaaagaatgggctcttcacctcatcacggacggcctggtgccggggtgttgggacaattcccgcgtgcctcctacgcgtgccgagaacctgagtacatctgttctcagagttcacatcgccagcgctagcgccaaaatcaaccagggtgggccttctgatgacaggaaagaccttcaaaacgacgaggttactggtagagtgtggacggggacacttccactctgggagtctgttgggacacccattccaagcattacaaacaaagtgaccgaggttccggggtacgtggttcaatggcgacagaatcaaaatgcgcagaacgagtcatacgctcgggaagccattgagaagggtaaatagtgataaagctagtacagagtcttctctaaacattacaatgtgatcagttcccatcaggataggccaatttatccaactcctgccattcttcgctctctgcatacgtggctcggataggagccagcagaacgttgaacgcatccgccacggccctcttcaaagattctggttgcagctggcctgctacgaatgctgcttcaatggcctcatacgaggtgaaatcctgcccctctccatgctcagcgtaggtggtaaaaacagtgtcaatcggcgaccctagtctgcagaaagggcgctggtccagctcggaaccggtgctctcgtgtaagttcaggcctgtcttccctagtaatctttccatgcgctgctcactgatgggaattagaatatctcgaagcagccctaggactccatttcccgtgacttgtcgttcggggcacgctgcgccgaatatcttgccacggactgtttcggggtcgtccagaaactcaatcttcgtctccgccgacttggaagaggacatcttcaaaccatcaagccctgctaccatggcattcatcagatgctcccggcggcggtacccgagcatagggatgaacttcttggcgtgctcaaagaggcccgtctgatccccagaaccgttagcaggaatttaagtgagtagttttcatcctacgaacctgatcctcgccgccatactgtatgtccagatccaggtacggctctgagagtgactggtagatggagcagagcaggggacttatttgttctgtctctgccacttcagctgaggtgtcccgcgcatctttttgcgtcatgatggcgcagagcttctggacatcaatcacaaagtccttttcataggcaaggctggactcggccacgaagttcacttgagacggtgatacgccaagtgccttcaggatagcggtgaccaggaagtggtaatactgttgtcgatatgccacagtctccatggaatggatgtagttaacaagaaacccgtagacgtcaagatagtacacagtcacctaagcatgcgtcagtacgcaggtcggcttgggctatagatgggttatacggacatcaaggccagccctgaggaagtcaagcagcttcgcaattggcacgaagtatccaacatgagctatacgacaaaggttagtgccagcatcattctcctgtcagccaaaaggacacatacgcttgcctgtaggtgtggtttcccaggccaacttgagcttaggcttttcttccaggagcccttgcagagattctgcgtccgcaggttcgaggaaggattgcctcctagtaatgaggttcagcttctcctctgtagagagcatcttttgagacattgaaaaggtttggattttaaattctagtcctggaatggtaggaaatctgcttccttaaatactaatcgtcatttggggatgacatgaacggcactattcgagtcccttgcgaaactctgtggggacctttcgtatactatctatgatgggtgaatttttgctgtgggccagacactacgctatagcattggctgaatttcagtacctaacagggctttcggtacctgaccttttgctcgtagccgcagtagtgcccatcgctcctattttcggaagaagccatcgactcgccatgatagtaagcgggagccccataatgaccgtaggctacatcaactaatgccatactgtagtattaaccaagaacataagccacataataatgctgatttgcaaatactaccctggcaacacgggcaagcaacggacggacccgccaaatactgtagttctcccccgaggcgtgatcacatgccacctcagcttgcagatgccggtcttcttcgggatggtaggcggagaatccgactcgaagaggctcgggctagtagcttagcagatgcggaccaccttggcagattcagcctctcgtaagatatttaaggatgtgagattaattccgccggcctccgattttattccggagcactgtcccctacgtgaggtggggctcgtttactccgaaagatgcaggtataaactcatcgcaaggatggaggaagagcaagtacggttacatcgcgcatatccagggatatttccaatcgggtcttctcgagcatgtatgtagtccgtatttttgggttcaaacaatcgtcttgaagtggtatgtctaatttccacaaatattcactctcgtattctagttcaccggccagtatcaaggccaaatatttcctcaagtatatttttcctttgtctgggtgctagcgtatctatagatgtatcaatgttatttgaagggtaacttacctatgtaaataagcttgacgttttgcgttgtatcgatgtttctttgctaagtcgagctagacttttcaagagagtagtcacttacttattcgcatgatttctccatctttcttaagactctctgtccctcatcactacatcagtccctaaggctagacttagaaaagaacggtagcataccatggctcaatccctcccgcatctgcctaagggcatcccatcccctctggttatgtggaaagacatgactccctatcacgcacgactacaggcagcaagcctctcgtctcctcgggtcctcgtgattggaggaggtgtgacgggcttgataacttcatgggcgctgcttgacaaggggtaccatgtgacgatcctctctaaggagtgggcatcgtacggccacgagcaacggctgacctcgcagatcgccggcgcgctgtgggaatttcctccggccgtgtgtgggcagcacaccgacgccatctcgctggccaactctaagcgctggtgtatggtcgcctaccataactgggaccagatggccgccatccccgctatcgccgctgtttcgggtgtgtccatgaagccagccgactttttcttccccaatcctattgaggaggacccggcgcagttggccaagatggaggagatcatggctagcggcgttcgggggttcctccgctctatccgcctaatagagaagcgccacatcgatccgcaatacggcgccgtcgatggttatgagcacttggcaccgattatcgacaccgaccaatgcatggcttggctcatggatctggtccaggccaaaggtgccacgctcgtaacggagacactgcagggggacatcctcgaccatgaggaacggcttcgtcgacgctttcaagcagacgtgattttgaacgctacggggctagctggtgccgagctcgccggcgatacctcctgctatcctatccgcggcggactaattcgagtcatcaacgatggctcggacttccccaaggcggaggccgccctcaccatctccgctgatgccgcccactctgagcatgagatcgtcttcctggtgcctcgcaacgacaacatcctattgatcggcggcattgccgagtcccacgaatgggatctggatctgacactggactcgcccatcattaagcgcatgcgagcgcgctgcgagtccttcctccccggtctcaaggatgctcgcttggaccctgactacccattggcccagggactgcgacccttccgggcaaagaatgtgcgtgtggagcgtgaactgcgcaaactgggccgcaagcctagccgcattgtgcactcatatggccaaggcggtgcgggatggagtctctccttcggctgtgcatcggatgccctggcgttgattgaagaagccctgctggatctggaaccggttcctatggccattcttgatcagaaagattattcttgccccatggtatctcagaccattcaggccaacttatagtggatatctgcctctagattttagtcggcgcacgcgtatgagttgatagtagacatcattgccagggttcagggtccggatcctcgcccctcatagaccctcatttcatacaatttctacgctttacataaatcggttgaataaatacgccgattcatccaataagatactgttgtttacacctgttctagtactttggataatctatgttgttcatcttgaatatatctttctgtcctaagtaaatttgcgaaattgcgcgataaccaagggccttacgactccataaactcgatcacgttatttatcacctccagcacttttgtctgatactcacgtgaggctgccttgcccgctgaaatgatggcttgtgctgttgaaatagcacctgttctaactcagaggaagattaataattgggtcaggaattatttcagacgctgcggctttgttcctgatctgcaacagcctcatatcatctcgtattgacgcactaggcattccttcctcacctattcacatcatgaagtggtgcttgacatcaatatacttggacttccgttggaattatgagtttctggtaagcttcaaggcagaactgtcaacgtagagaggaactgcattgatatgaatcccggggatgcagaggtcattgataaagtttcgaatcaatacagcttccttcgcagcctccacacatgcaatatgtctccgcatctatggaaacgactgattctaacttctaatgctacgtaaagtgtgactgtagaagctctggggaagataatgatggttcattctctagtctattttttctgctggttgggtttttctgccaaagttagccgttgacttttcaccgcattctttctcatgattttggagcccgtaggataaaaccccctggtcacgtgacatacacacacacgaggttatgatgtaattgcttcgctttgctccgcaattaatgaagcgagacgaagaatacagaaatgtacttagacggcgtcatggtaatatcataaatcatttaatggctattcaaattactatagggataccatagtaaatgatacaagctgatcaaaaactgcggccagcgggagacatacccgaagtagtttagcgcggagtgtgtcgcaagtaaaatgaatgtgtccatagacgttctctacccaaaaggggtcgaattagcgattatggggggtccctgtaacaatccccttctttattttattcccttgctcaagtcattcaatactgatgtaggcgcatacaagagagaagtgatcaaccagaaagcgatgatatgaagatggatggaagatggtgatctagctactgccatgaatctctctatatagctccatgctacaaagccaccagatcccatcctccagaaatcagaagaagcatctctgcaggtatacaaagagaattccaacacggaaagctgaacagcaagtcatgtcatctgcgagtgaagtgaaagaaagggaaaggctttatcgaggtcaccagttaccaagcattcagtaacttcagctatcagagctaaccatgcagtcgtcgatgtcaggccaagcgccaagtcaggctttccagtcgaacaagcggcgaagactcgtccctacgattgatcctgatatgatcgagccacttaaccgcttttcggatatgctcgctgatatgaacagcgatgatcctgtcattcgatcccgtgcggctgcgcagcttacagtattatctcctttaatgcaacaactcgcctttgcaaagaacgccgccggcgtccattatgctgcaagggatttcaaaacccttggagtggcctgtatattctggagatcacacaaggaatgcgtcaaatacagtgtgcatcacacacgcataatggaacgaagtatcccggtaccttcaaaatgcaatcaattatatttttactcaaacagaagagcaaattaagtccgatctaaagtgtgtcgatgagatccgcaaatcattggccacaactgccagcaatctctctactttgtccactcgcaaacgccgccgtgaggaacccgaataatgatattcgcaagacaaagtcgttgccctctgagaagcttcacctggggtttctctagctcttctgcttattctccttcttccatctcttatttcaaagcttcgtttatttagtattctcctgagactcaaactgtcatttttagtctacgcagtaccctagggtcgagatctatatcgcttaaagagagaccatatgtcttttatgtcagtgtgaccaagtggataggagtgaggatttatgtcataagacacagcagtgacaccatcctgattttcgctagctcgtgtcgtgcttcgtgaacatgggtttcatatatccacggttcagtcattacaatctgtggcatttgatgtctagctattgaagaggggtccctgtaacggggacaggggcaccgatagccctgcttgcaaaacaggtgtgagagcagagttgttactgagagggtgctagagaggagaatatgttgggtgaccggaaggcggtcacccatgtgggtccagatcactagatagttccgctccctcttcctctctctctctccctcttgtccatcagatcttagccgaatctacactagttgttttccccttttcaggtacaacgtagttagatcgccattacaatctcaggtatctttaatctgtttgatcactacattctcacttcaagatcattgatctctaaaaaataagaaagaaaattgctgaatctgatgcttaattaaggatatcccacccctccgatacctcactacactttcagcctggtactgactttgttgggctctgggtatgattcagatccagccagatcaaaccatgagaccagaaattagtcttcacggaagaggaagctgcagagggagatagagactaagctatgctcgtggaatgggaaactacaaattcggcaggcacgaacctattaagtcgagagtacatcgtgtttcccccgagcactcgatgtttttcctctcattaacattcttgttatagagtacattactgccacgatcacgatcaccactactttcttgcatatcgcctctgtggctccctcgcccacccctccctccgctatcgataacctagtgaggatcctaaatagaagctctcgattctcgaaacacgactgggggcttttcgtgcattagctgacatctcgcggcatagcatctaaaacctaaatccggcccccgcggccgaggatactactgctaagactgtggcccatgccggcgggacagccaggtaagttgtgattcatatgccccatcattgcccctattcactggtagtaaacgctaattttggaacatgttgaagccaataccaaccccgctggccccggcctaggcgggccctcgagcccctcgcttgtcggccggctcttcgacaaggggaaagaccgcttcgccagcaaatccagtggccagcgttgcccgcaccgctgcccatggtttgaaggaaggcggcaagcccctcccctaggcggcgtgaggggttgtggtgtcgacagcgttcctctgttgttttgtccgatttcttctctccgagaacctgagctaggtgagatgaatgaaaacggatgtaccatatatgtaaggcggggatggcattcctctggggccttttgaccgtttttgcttctgtactggcctcggtattccatgtccttattattttcacacccgcaatcccaaatattgatctagtggaagtctgacaaaccaggtatcaaggtagatacttgtctcaacactatatatcttcctgtttgcgagttgtccaccgtaatactagctctttcaatgtcatattttgatccttgacacgcccctaatagtgttcttcgccaacctcgaatgcggaatcgccattgtatgctccagggctgacaggttagattacaaagcacatctagttaactaacgactacccaccattagggttccttgctcttttatgtactttactttcttgacaagtagcaaacacgctacatgtggtgcccttgatggaaatggatcttgacagaagacgaactgaaatcctccgttcctacaacacaatggctaggtgatttccggattgggaaatatatccctttatcctcctcatccaatgattccacgcccttattcaagctccaagcaggagtcggctccttctcggatcggccgccaatgtttcgggccgatcttgagctctttcccgctgtcggcatctgtgccgagcaggcgccttctactccgatcgctttgactagtacgctttgagccgcaccccactgggatatgctgatcggggcgaatcggagcccctccatcattgaacagctcatgagcaaaccagctttgcctgacgattccaaagtccaatccgaggcgctaggtaccaataggcgaactaatcatgttacagttctgctacaagaggtcagtggattttgctgcttctgtcctaaaatcaaggtccaagagtgagagccacagagatccaggttgctccactgataagcccgaacctgatccgcccgaatatgatctgcgtcaagctccttgaattgcagttgacctgttgatagcagctgatgctacttttgtacttcgattttgtattgtagataatctaatgtaatattcgggacattgagattgacaatgacatatagaataaagattaacgcaagtacaagtgtcatattgccctaaatggccgtactgttcccgtcgttccggtcaacctaggtaaaaaagcccagcggtaaaaccagccccacatccccgcggagccccaacgccgccgataaccgacctcggctcaaagcgaccccgtgatttacatatgacctttatcttcctcccgaggttactctttttcccttccttttcttcctcatagcaccttgagcttattctacacttatatcacaatggcttctattattcgttctttgcgacctttgtcgcgtgcccctacagtccgcctagcgggcaagcgcctcgctgctggccggcccgtgcagaggtaccgttttgcccatgagcacaccaatgctattaaaaacaaattcgctaaccagtttacccccattatagcgcgtatgcattttccaccacaccccgccggcgggaggtcgacatctccgagctgaccccgacacccatcacccatttgtctgagacggagtctctgatggccgactcggtatcgaagttcgccgcggagcaaattggccccaaggtacgggatatggacgaagccgagcacatggatcccaaggtcgtcgagcagctcttcgagcagggcctgatgggcattgaggtgcccgaggagttcggtggcgctggcatgaacttcaccgctgccatcgtcgcgatcgaggagttggcacgcgtcgaccccagtgtcagtgtgctggtcgatgtccacaacacactcgtcaacaccgccatcttgacgcacggagatgcccagtctcaccgtacctggttgcccaagctgacttccggcactgttggttcgttctgtctttccgagcccgcgtctggttccgacgccttcgcgctccagaccaaggccgagaagaccgccgatggttataagatcaacggctctaagatgtggatcaccaactctatggaggctggtatcttcatcgtctttgccaacattgaccccagcaagggctaccgcggtatcactgctttcattgtcgagaaggatacccccggtttctccatcgccaagaaggagaagaagctcggaatccgcgctagcagcacctgtgtgctcaacttcgacgactgtgtcatccccaagagcaacctgctcggcacggaaggacagggatacaagtacgccatcagcaccttgaacgagggccgtattggtatcgcagctcagatgaccggtctggccctcggtgcatgggagaacgccgtacggtaagctttcttgttcaatccacacccgcatatgaatccgataagctgaccaaaccaaagatacgtctggaacgaccgtcgccaattcggcgacctcatcggaaacttccagggtatgcagcaccagattgcgcaggcctacactgagattgccgctgcccgcgctctcgtctacaacgccgcccgcaagaaggaggccggccaggacttcgtccaggacgccgctatggctaagctcttcgcttcccaggttgccggccgcgtgtccagctctgctgttgagtggatgggtggtatgggcttcgtccgtgagggcattgctgagaagatgtaccgtgacagcaagatcggcgctatctacgagggtaccagcaacatccagctccagaccattgccaagattctgcagaagaagtacaccaactagacgtgtgatgggggtgattacctacgccaaatggctttgtttgtatatagtttgattccatgcaggatgtggcgtattgattgtttttgggtatgtattcattgttccctttggggtatacacaaaacatgaagagccatcatgggtcatccctgtgaccatttcaaattcactccgagatatgaatgtcaaactgtgtacaagagtaaagagcagactgaggccatgcgaatgtgcccagccttgtttgtatatccaatcctagcaatcatcttctggcgtctgctgaccaccgctcatcgagtcgcatattgtagatggaccgtgctcgggcagcttacttcattcgacagggcgattatttctgttatcatttttgtcgttattatttatgcatgaaagacaattccaatcgcaatttccgcaacgactatgaagtattgctttgagatctatagcaatgatcagtatgcatcttcgtatcgaggttcttgaacgaaactcacatgacaggagaccagatcgcctgaactcgcaaggcattatgtttccaccgaatcaatgtccttgaacagccccggttgctggcacatgcgttattccacatgtgctattcacgatggaggcacccatggaaactcgtatgtcggatccgtccgttgcgattgaggcattggttgcgggtaagctgatgtggagggttggtagacttgggcggaagtgggctgaggaacgggactggcactcgacatggaaagtgaccgatcgctgtaagtgaattcggagaaagaggattcggattgttgctgaggtgggcagatgggttgtccttggtgaattcgactatctatgggatatggctccatacgattcgggaattcgggattggaggctgcgccgagcgacggcgaccttgtgggcggatatggttgctgccagtcatgctgaggagacgctcgacgcggtactaacaggctcgatggctgggtgtgggatgttgcagtgaagtgtggcggtggcaatgcccctgctggaatacccgatattgcactattccggggttctcccaaagaccactcacttcgaaacgaagccatcggttcgttactggaggcaaactccggtcggccagtcaaagcagcaatttgatgcttcaatcggatgacttcattctccagaaaggcattgtgttgcacgacttcatcgaaccgctcggttcggagccgcatctcctcaatttgtgactcaagatgttctatatgctccttggtgcgttggcgaatggaccgttgagcctctcgatcgttggcacgctttcgctctagttgttccgcggacaatgtcgagactttccttgaccccgatcgagattcacgtctcctcgcaggtggttcatcttgagagctcatgattattggtttcctcgcacacccgagactcgatataaagctcccctccgttgcccagaacctttcaaagagaaccccccgctggcgaccatgaacccagcacttcagcctaacatgaggggaagtggtggatcactggttttgaaagatggcgtgtgggtggctcgagactatttccgagcggagcagggatcaaggaagagagagcgtgacagatcgtgccaattcagggctagattagcttggacgactatacggtgtggggaggaaaataaagatgatgtgcgtggtatagccatggatcctttcaggacgtgattataaccttcccagcaaccgagtggctgaataagacctgaatattgttcccctcttcaacacggcacctcattttctccagattgcttaacaagccaggcaaatctccccgatgatgcggcgaaagcgagactctaagccgacccctaagcacccaataagcgtggagagatcgaactgtgtggatagctacggagtactccgtacgggtcatgaatatagtgttttctttccagccactacggtgagccgcccccatcgcgaggtccgcttttttcgactcctgctcccacttactcaagggtcttctgttggcgccaagccgtgcgccataatgatgggcatttatggggtgctccgtactccgtaccgtgtactccttttccgttctgtgtgctggctgagcgattcaagttgagtgttgttccgtcaagccggggcgcacagaaaaagtactaaaaagacggcttgcgccataaggcatccacagaccatcggtgatgatccgcgtctttgtggagatagcgtcttgtggagatatgtacggagtaaaaggcggacgagaatcctttggcccccgatggtccccgagaatgtccaggtatccacgggctccggggaattatttgcacggtataagcagactaatatctctagaagaagggcatctgatgttgtcagactgattgtttgaaaggcatttgtccgcaatagccgcaaggttttgacactcctattatcgtggtcttatgttcaccctaagaattttaacgggggattgcaattttattattcgagcaccaccgtgtccgctctgacgggaattgagaaaccggatgacctctgcattttgatgtttgatgcgtctaaggatcttattgaccatataggggattttacctattctggagacataattagactattccggagacatagttagaatcactcccccatagatgctgcgccttgctcactcgaaatctgccagagcataactcatgcttaccgacgtttaataattgactgaaacgtatacaagcgacaccgacatgtccagcatacgttgtacatgatcgccatgatgtggaggtatgtaagtggggaattgggcacggtcatgaaaatgctacacagtagaccttacgattttaagcggcgtgtatgcggacgtttgcactggtttaagacacggtccgtgacctccggtcgatcatatggatctgatgtcggcgttattcgccgtgagccctaaccgagtagccactcttgaatttacgatattggccaaccgtcccgaatatgttctagtcggtgagaataaaaacgcgcgcaaagtatttgattggatgaggaatgattcgtgttcatgacgggtggcaaggaaggtgactgccataaagtgaggaaaatgttataatttggctgagatgtccttagcgaagctgacaaccctgttagggacatcatcggagattgcttacaacaatagaatggcccaccagaagtacctacgtaggtgctactactatgtatcggtcttcgccccatattgggtgatcgactaggactattgggcgaatcatatcaataggatatggcctcgaagcatcttgcagggattccttgaaaatctgagttctgacatgctgctttgcgtttcttccagatcattctcctctgtaaatcgctgcatgttttcaacgtaaatgatcacactaacctacgccctagaacttctagaagtttcccccgccggttcaaagcctccggaaatatggccacgagaaggaattctcagcagggataactactaaaggtatagccataacatccatctaattttggccaagtatttggacccctgatatattttcgcatgaaaaaagactctgagcaggcgaattaccatatgcggttagtctgacttcccaggaactgtcccacaattcacgtgatatcaagcgaagatagtgggtcttatatggccaatcacatgacgcataccagactttaggacaatcttaaatgcttggcaacaaatctcttctttgtcaaatgtaaacttgtaatgattcacatcatcaagcatcagtctaaacttttgctaaactagaacaaactaggaagaaagattacactcactcacaccttctctttgtcttgttttgtcaacaaacattaacattcattcactcgccacttcgagtttgaattttcatcaaagcaattaactgcagtttcttgaagaaatataagcctcgaccatcatggaaggtcttcaactcaaagatactcagctgtactcaactatggctgggaagctggatgccaggctcctcaaagcccttgaggtgatgggcttcaccaatatgacccctgtccagcagcgtgttttaaacgagctgccaagttggcgcagtgactgtcttgtccaagccaaaaccggaactggaaaaacccttgctttcttgttgcctgcattgcactgcctgcttcaaggtgataccgcgccacccaaaggcaaggtcggcatcttgatcattaccccaacccgagaacttgcccaacaaattgccaaggcgtgtgatgaactaacctcgcaacttcccactcctcttgagtgccatgttgcagtcggtggaacagcccgagcatccgctcattcgcgcttcatgaagggcgcaccttccattcttgtcgccaccccgggacgcctgtgcgactacctttctcaaactcccaccgctaagaagttgtctaacatccagacattggtcttggatgaagccgacacgatgcttgagagtggctttatcgctgatgtgaagcgcatcctccaactgatcccacaaaagagcactgggtggcaaggcatgtgcttctcagccactgtcccacccaaagtcaaggatgtggtcaatattgtgttgaagagagactacaccagcatttccaccattgataagaacgaagcaccaacccatgagagagttccccagtactacgtgctgatgccatctgtggcagataccttcactacacttgcctccctgctcaagcatgaaatcaagactagctcaaaaattatcgttttcggcgtgactgcacacatggttgctctcctcgcaggagtcttctgcaagggcatggttcatttgaaggtgttcgagatccactccagactcaaccagggtgctcgcacaagaaccaccaaccagttcaaggaagccgaatccggaatccttttcgcttcagatgttattggtcgtggtatggatttccccaacgtcgacttggtcatccaggtcggtttgccatcgaacggcgagcagtacgttcaccgcgtcggccgtaccgcccgtgctggcgctgacggtcgcgctatcattctcctcacggagggcgagtcgttcttcatcaagaacaaccgccagttgcccatcaagccccatcccgactccgaagcgatcaatgctggcgctgcttcatgctccaaggctgtcctagcggccatgtacaccatcgacgaagagtcgaagcaacgtgcttactcgtctttcattggtttcttcgctgggtccggtcttctgaggcagcttcgtctcgacaaggctggccttgttcaactcgccaacgagatggctgtcaagggcatgggatgccccgagcctcccccaatggacagaaaggtcattggcaagatgggcttgaagggcgttccgggtttcacctatgcagaccccaatgagatgggccgaggaggatcctctagacctcgcaactcttcccgaggtggcaagaatcgcgatgcactcagccctggagctggtcaaggagaccgaggcggcgttgagaagcgcggaggagggcgcggaggccgtggtgcacgtcgtggtggtggcggcggacgtggaaagccgagatcatgatcttttttgcatattgatgtcgagcacagcgtgctaaaatgttattatccatagacactagagactaacgacctgctacacaaaattccttaatcgaacccaaaattacttgcgaacagttgtcacatcttgatgtaaagtcgtaaaggccaaactggaagctagccacggtactcaccattgctttgagtccacaagattccgacttaattgacacagtgtcattattgatcttgacagttgttcttgggaatactaaaatggtcaggtgatcacaggtaaacacacatttagagcttcaacactctaccattccaacacgtcattctttaacttggaacatttcagggcgatcagctatctatattgataactgcccaatatggatccgagctacaaagctcgcaaggaggcttttgtgtctaatcttgcgggaagcacaatcctcgagatcaatgcagtgacactcgttgcatcagtgagaaacctcaagactttatctcgcaattgatacattctgacctgtgaccactctagacttctgtcctcctttggtcagcgctccagtctcgtctatccttcttcacgccctacagtcctgcagcgctcgcgaccgacttcatcctcaatgtactagccatcttattcgcaacgactgcatactcctccgcaccgcttctcctcaacatcttcctcatctcccccgcggtcctcctattcctcacccgaaacggcctgcgaacaccccaaaaagccaaacctccccgcaaacccaaggccaaaaatgagagctcccaggaggagcagcaggctttgcccattcacccattcttgaccacgtaccgtgcggccatgatggttgtcacctgcatagctattctcgcagtcgacttccgcgcgtttccacgtcgttttgccaaggtagagaactggggaacatctttgatggacttgggtgtgggctcttttgtgttctcggctggagtagtctctgcgcgtgcggttttgaagggccgggactcgaaatccccaaaattagctttgcataagagattgattgggtcggctcggcactccattcctctgcttgtgctaggcctcatccgactgtggagtgtgaaaggattggactacgcggaacatgtgacggaatatggtgtacactggaactttttcttcacgcttggctttttgcctcctttcgtggagctattcgactccttgactacattgattccctcgtatgaggtacttgcacttggaattgcagtactctaccaagtcactctggagtcgactgatctcaagggttacattcttgtgtctcctcggggaccagatctactctccaagaaccgagagggagtcttttctttcatcggatattttgcaatcttcctcgctggacggggtgttggagtccgcatcattcctcgtggtacctcggccacaatatcgcctcagcaggcacggagctctgttctggtgtgcttggttctgcagggaatgttctggtctaccatgttcttcttcaattccacctacgcgtttggctatggtgccaacatcccagtgtcgcgccggctggctaacatgccgtatgtgctttgggtgtcagcattcaacagcgcccagcttttcctgttctgtctgacagagactgtgtttttccccgcggtccaccgtgcgactagcaaggaaagcgaatcagagcagacgtcatttgcgaccagtcggattttacatgccttcaaccgcggtggccttgcattgttcctgattgcgaacctgctcactggagcagtgaacctgaccattccaacattggatctcaacacgccgcaagccatgggcattctaattgtctatgcggcggtgttaactggtgctgctttggggatggacaagtacaatattaagttgagcttgtagatatattggaatacttatagatgtagtattatctaacttaaacattgcatatagatgttcatctgcagggatataaacctctgacgtaactcgagtttagccgcggcatgtgatattggtggagcaacatatgagcccgctccgagagtcacgcaaaccattctgcaactaacactatgcctgtcaatgaacaatcttttcttaattaccctccagcacttgagggtcctaatgtgccgtacaagtatgaagaccaggtcctaccggtcttccgtggcgtgcctctagccatcggcgctacattgtaagctacaggagagctccattgagtgatcgccacatactaattcaccgctgtttcttccagaatccataacatcgggtttatccaaagtcatttctggcgtaatgctggcttcggcgtcattcgtgaaatctctcacttgggccagtacgccggccgctacgatccaactgtgattccagtcgacaatactacccaggccgagtcagcagcgaaagcggcatctgcagttgtggagcgcaggaagggagttcatggatactatacttctgcagactaccgtgcgctctacttgtcgggggagctgactccgaccgctgtcgtcgagacgctattgcctctaatccggcgtgatattcagccgtccgggaaacactcggttgctttccttgagtctcaggtcgagttgattcgtgcagcagcggaagaatctacggagcgatacaagaagggcgagtcgttgggtccactcgacggcgtgccggtcgcagtgaaggatgaggtgcacctcacggggtataagcgcacgctaggctcgaagctggatttcaagcacggtaccgatgcaacctcgtggtgtgtaaagcaatggctggacgccggagctataatcatcggaaaaacttctatgcatgagattggactgggtgagttcttattggtcatcatcgagtttcagtagctagttaactaatactctccagacacaaccaacaataacccgaactatggaacacctagaaacccccacaataaggagtactattgtggcggttcctccggtggctctggatatgctgtcgcagcgggccttatacccattgcgctgggcgcagacggcggaggctcaattcgtatcccgtcgtcattttgtggtatttggggcctgaagccttcacatggtcgtgtgtccggtgcgccatcgcaaagtctcgcgcccagtgttggcgttatcgggcctatggctgccagcatcgatgacctcgccctcgcctatcgaatcatggccactccggcaccagcttcagaggacccgatttcatcgcagttcccctatcctgttccgccggactctgatgtcaaaaggacgaagacaattggtattgtgcgcgactggatcgaccgcgccgagggccctgtgcgcgctgcacttgatcgggcgctcgactactatcgcgagcaaggctacaacattatcgatatcacaattccttaccttcccgagggtcagcgtgcccacgctcttaccatcatggcggagatcgcatctggcgttgatgcaagcaagatccggcagctcacagccccgaacaaagtgcttgtctctatgggcatgtaccaggtcaccgcacaggacttgctcgcctctcagcggctacgcaatctcctcatgacgcatctcgcgcatctcttcaagacccaccccggtctgctcattgtttcgcccacaactcctatccctggatggcatattgacggcggtgaggcggatttatctcgcggtttgtcggatgctggatcatctgtgcgcaatatggaatatgtttggctggccaactttactggttgccctgctatcagttgtcctgttgattatacccctggcggtgtgcctatcggtgtgatggctatgagcgaatggggcaccgaggaagagctgatcgcctttgctcgagatggagagcctatcttggacctgcctagtagttcttcgcccgaggaaagtgaaattgcctcggcaactaagggtctacgaactccttctgatgatctctctgtgtgggaagatattatcgcacaggccaaggagaagatatccaattaagcagagtcaattctaatcaatggtggccggttgatatttttgtcatttattatattccgatgtgttcatttacaagtcacgagacaagcctttccttagtctgaacaatatacgtctccctctgtattttccaactctctctctattcagactttcaaactcccctcattcagtccaacctttgcactattccttgctccagtgccgcatccgtacgtgcatcggcgcaccatcttttgggtgcgacgttgctttcccggtggtatacattcgctcaccctcaacagtccgccggtccactttcaagccctgcagttcccgcagctcatcccattgatcccaggccatctcaatatcaaaactacgtacagtaaagaccaacaccaatttgagcacaacgaccgccagttcctgcccgatacatttcctaggctcaagttggaacccacgccagatgtttttcgccggatgcaacctgtcgccttctagggcggaaaatcgctccggcatgaatttgagcgggtcgacaaagttcgctggatcatggtgaatggtgatagagctgtcgaaaagatcgaacccgtctgtcggccaaggctcgtcctcgccgtttattttcaggttgaatgaaggctgaccttcccgaatcgtgatcgttgctggattcatgcgcagtgtctccttgatcactcccagggtatattgtaacgagtccaggatatgaggcgcttcgcgaatcttttctgcggcaacgcttggatcggagccgagaatcgcgtcatgttcagctcgcaattttgcgacacattccgggttcaactggagttgtctgaatacacggggaattgtgatggacagcgcatcatcaccgccaaagaaaaatatcatcagctggtagaagacttgttcgatgaaggcttcatctgggggattggcggttcccttgcctccaagctcgccagtatactcttcaactgcagaccggattatggttcgtgggctattgctagcggcgtttataccgtttgtgataaacggtcggagatgtttgaagagctggtttctcttacgttgtacgatcagtttgaacaacggggtaatcctccacagaagcttgcgaaggctcagagttatttccatgcggctcaattgctcgcggtaagcgatagtgaaaggggagggatataacgattgggaattaagccgggtatcgctggagttgtcagcgaaaaagtagtgaatccccatataagacgatcgataggcttgacttacagaaccaccctccccgtgacatcaaatgccaagttgctagatatctgctcaaaagggaaaacctgaccccattgaccatcaccactggaaaggcctttgagcacattcgcaaaggcatcaacctcctcgataatagcaggtatccaggttctaatattggtccgactgaatccggggttgaatctcgagcgccacatgtgccactcctccccgtgcatgcagttgaggtccctcccattcgaaatgggattcaaaaactctccttgcatgggagactttggcaagctgcttccaatctccatttgatttgatacatatgcctgtagggaaaatgccatcggtctggaaataggccatacgtcgaggtaaatgacagggggacattgttgctcatttggaaagaatttcggccagtatctgctgatatagaaaccaaaggtctgaatgaagttggcatcaaaggcccagtctctgtaaaattggattacgacgagaaaatgtcctaataaaatgagtgaggcaagattggcttgcgatgttagcttaggattcttttcggtgagataagagatgtacgatgccttgagactggagtcttctgaatttcattcttgcttgatatagctgcacggtaaacctgaatactagcactgccacaaccattatggtaagcaaagacattctctgtccttttcctaaatcactaagcctgggcgatagtagaaacggaagcatggctgccgtttcctgagatgaattattgttgggtgaccggaaggcggtcacccatgtgggtctagatcactagatagctccgctccctcttcctctctttctctctctctcctcgtccatcagatcttagcgaatccacactagttgctttcccttttcaggtataacgtagttagatataccattaggttataagtacttgtctctagctagtaaggactgctagcaacctctaaccctaagtcttttttcctagaccctacttcccggcgcttaacctatataacgcgcgtttcctaccaattagatttaatcctagtaaagccttaataataatagaattagtataccagctcttagtatagctaatagcagtattaactctagggataataacccgaataattagttataatttttactattaggtaataataatatatcttaggagataggaaatacctcttaaccctagactaatataatattattaggtaatagatataataagaagaatcaggctactaacctacctaatatctcggctataaaaatatagaaagttaaagtacttaagtataattctagaaatccttatagataggcgatccctattaagtttactcttatactattaaggctagaatatattattaatagtagtataccttactctactaagggtaacctaaaatttaatagataggagtactagttatatatagtagctagttagctttatatttaggttaataatatactctaagaataaatctagaatctcttatacctcctagaatttactgatataatatttaataaaattatattaatagtataaggctctgataaggctgaaaatatactaaataaaactaaaaagttcgataaaatgaaataagcggactttaatactataaaggaatttattatagaatactagaaataatactatattcttttataatttaaaatttaactataccctttttatatactattataagttctatagtaattagataaagaaatatctaaggtttaatttattattaaggagattagtaatattaaactaaagaaaattatactcgaaaagatagactagtattataagagcctctaggtagtttctaactaagaagggactgctaatatagcctagtccttaagggaatagggtaataactatagtagaggatatagaggataaggtactaagaggggtagtaaaggaggtaataataaaacctccttaagctaagaaaataaatctttaaaggatatatcgaccagaaataacgtacttctgtacattccttatatctagtggtatattagtagttagtagctatatatagcgattatataaatatatactaagatagatctcggaggagaacnnnnnnnnnnnnnnnnnnnttaatactataaaatctactattagtaggtattctaactagttatcctagttatatttaatatatagtcttaattactatactataaactaatttataatttcgctctagctatctatttataggtggtatatagtagatagtttctacttaatccctaggattttatagaactctatctaaaacttagagataaactatcccctttagtctaatataatagttttagggatccctataatctatataacgttatctataaatagatatactatctactttatattagtatctttataataggggattgatattagtctcttacttagttaattaataataataaatactatattatagctatatctatcctttaggaaggaatagaaatctattaataaatactactatagttatttaggaatcagtaataggtataggagactaggtatacgatctctctaggtctttatatatttatatattatatagttatctatatactactttatatctataacctattctaactaatagtatcttattataataagtttcttaagtttcttaattctagggtatatagttaatagttattagtatatcttattaagtaactatacttaaagatccctttcgttagagacttcgagatagtctttaaatagtagtaatctgtcttatactacctaatagggatccgtttcctatcttatagtctaatagaatacttttagcttagggctctagcggttcgctaactagacttattcggttatatctaagttctatatagtcttaactagtagagggagggcctttatatcctatatagattctatctataatagggatatctcgatttctagtattaatttcgttttttctccgaaatattccttagggagtaatataaggtattgactgatatctatataagggctttccttccttaaaagaatatctgcgataatattctgtttcctaggatagtatttaattataaagtagaattgtaagaggaacttactctactatacttattattaatttatctattatactattataaaatatttaagagactgataatctataaggatctcgaaatgttctatataagagagccctttaagttctagtcgctattcttaaagtatataaataatcgcgaggaattccttatccctgattttataattaagctctataggttatatagtctttaagaagaaggtaataggatactaaaaattgttagccttatgatattataagaggatagtactaatgactccgtttaaggtatctgtttctatataggtctagaggtcaggattataatactataggataggtatagttattaacttatactttaattatataaatacttacttacagtccggcgactatttatatactatattatactatataagataatataacagttttaaaaggaaactgtaatccttaataaattgttaatagaagttatagaatcctaagaaggattgtattcccttaattattaatagtatcttctagttcctaataactgcgatcttctctagatctactataataccatcggtacttataataaatcctaagaacttagttttctatatagagaatttatacttagatagtataacctataatcctactctttatagttatttaaggacttctctaatatacttcttatattcttcgagtatctcgctatagattataatattatctataaatataactgcgtagttgtctatatagtctctaagtactatatttataaattattagaatattataggactgttcgtaaggctaaacggagttactttatacttaaacgatctatattaggtatagaatattataagatcttctatagctagtgttaacctaatatagtagaaaccttagtagatattgagctttataaagaattttactttacttatttattagagtactttatcgataagaggtaacgggtaataatctttccttataattatatttaatctttagaagtctatatagaaacgtagactactacctagcttctttactattaagattagtaaagtatatagagctgaactaggaataataaatcctttcttaagattatcgaggatatactattttatagcttttagtttatctaataataatttatagagtaggtagtatcctagctatacttctgctttaaggataatattatggtctacccttaggtaatatagtagtagtttattagatttcttcttagagaatatttctataagattataatattcctataggagggttcgtttaatcttattaagttctatatcctttataatcgtagatttaatatctataatctaatcgattttatagagtaaggtctaaaagacttcgatatctttattaataactatttatatttataaatagttaaatcctatctaaccaataatactaatatctattagtaggagaacttcctttatttcttcttttagtatctctatttaaagaggtactagttcgattttattgttaaggttctattctatcttataatactctataacttactaatacctatattaatactcttttataatagggtatagcttctaagtctttaggtcctactatagattacttaaggcttattttttgaagagataattatattattctatatccttctagtaatctaacttaatttatatagaccgcttaaggattgttataagtataggtatagctaactagcctactaccttattaaaaagggtatttttatctagctagattatataataccgttagtagttaaggaagatatcgttctctacgaactatatatatctaataatcatattatattagcttagatctactactaatataggaatctactactagatctaattatctatacttagtataagaataatagtatatataataggttataataatttactgttaaatcctctaactaggtacttatagtctagtttatagatatataacctaaatttcttactaagtagtataactagttctatattaataaatattaaactatctgctctaatatctactagcgctaagattataaaggaatatctattataagtcagtcttatattaaatactaagctatcttataaacctcctaaaagcttatatagatctagtatatatagtaatacctattttctacctaagattaagacttctcctaggctcctacttttcttaggtctatattatcctctaattcttcgagtttaattatatataattagctataggtctagttagttgtagtaatagcgcttacagctgcgtttgcctttttctttaggtactcgaacgttatataccccttttccttataataaaagtattaaccctcctttataagagtctcttgctctatagctaatagtctagataataaggtagtccctttatattttatatatagggtaaaaccggactagttagcagtagtcctaactctacttctaaatatagttattatatagatatatatagtgccctttacttcctattagagactaatcttataggatatactttagtaactctaggtaaaggtatcgaaaggaaccgtttcttaattaatagtctatataacttaactctataatagatatagaagttttaaatataggttatacttatagttttttttaataactatggcttcttctataagctatataaatttagctaagaagtcggtaaagtcttccttaggttttatcttaagtttatagtaggctgtatatacttctatataataatttaggtttataaagatagtatagaggtagataataatatcttctgtgttagtatataggttatttaaggttatacttattcttagggtaatatatagctatactttacctttatattggctttatatatatagtttccagtagactagtaataggtaatagttagtatttactttgagcttctatctaataactgtctcctatatttcgaaacggacttcctttctatcctttaatattagtatattaggtatctttgtagacttctaactagtgactcctataattagtatattactttaggtttagtttatttcgctctaagtaagaataaggtaataggtaaggttatcgcgcttatatatagcgatatctctgtaggtagtagccttattatattcttcggtagcttggttatattctgttataagataatctttctctatatagagttaatcatattcttctataagtcgatcacattcttctgtaatttatctaatagcttccttagaccttctgttctctaagattaagacctagatttcgttatatattatctagttattatcttcgactatttagaactaattagctagcttaaggaattgttccttactaggagttatatatataatcttatagatagaaagagtcgaaggactctctttagggctattgtatttaatactcttaattaggtcctgtgttttagtaggagtcggggttttaggattagtagcttcttctacgagataatctagtactacgggttattttcccttaccgatcgcggtaatctattatggtaggactataactggtcctattctagttagtttcgggataggtagggtgaaactggactaggataaattgtaataattatctatatagtcgtacggctttagaagtttgggtttagggtgatacttaatattatattatatgctagattccttttaataaaagaagtgcatttctaatcgaatattaagtatggaaaaggaaaagaaaagaaataaacgtaaaaataataaatgggcttttatacccctttaggggcaaagccctattctcgtttcccctagaaggaaggtgcgactgcctgcgcaaacgactaatagtacaatcccaaacgggaaagtatgagtcccacaagtgccaatcgtgatagtatataaggataatatataggtttataggtcatataacctaaggaggctgtataggtagtatatattactcctatctagtctacagtcccccacgtacccaggataggtgctccacgccctatgacagggcttatacctcaggcatcagccttcttagtactggggtcctgacaatagtatatataacgaggtccatatatagtatagttatataactgtgctaagaaatcaggtagccatagtctctaactgatgggactacagtgtagtgatgcaattgaagagggagagagttgtcaattcctaaagggcagaatgcctaactatctagttatgggggttggtgcctgccgtaccgggctgatggtcaggtgaccaccatatccaacacacccccaggtataatcccgaggaatgcactcgtctgtttatttgttatggttttttttttttttttcattaggcagaaaccgtatcgtctagtaaaaactgccattactattattaataaaacaaaatgaattccagtgctttaaaatttgtataacgtatatatactatactgaagtgcaccttatcactgtatcaaggaaatctatcagaaatgcaaggacgattatgtagcccatagcatagctgttgaaactgagcctgaactttgaaggttagtgagactggaatagagatccataatccattggacacaagggaggaccgcttgcttctaggaggaccaggtctgcaatgatacagcaactcttttttttttttttttttttttttattgggtagaaactgtattatccagtaaaaactgctattactattattattaatttttttttttttttttcgatattaagttattttatctaacttttacctcgttaggtttccttattaggtatcttggctattatcttcttccttattggtttaaaaagctcccgcgccagtggctttattagggtatctacaatattttgcgtacttacgataagtttgagtttaataatcccttctctaactatatgcttaataaagtggtatctagtatctacctactttattccttttaagtagttatccttttttataatagatactatattattactatctgagtagatagtaattagtagtttctgttattttcctatctaatctataatctttaggaactatatatactcgcgaattacggtattaaaggtaatatactctactactatactacttctagcgataatttcttctttcttagaggactagctgataggtcccccggtatagtaaaagataaataccttagtgcttttgctatccttataattataatacaatatattaatatatctaattagactagtcgataggtctttcctaagaaggatacctaggtctattatccccttaatatatctattcagctatttaagtgtatcgatatcctcttctcttagggcagaggctcttctctagagtttattaactataagggtaatattaggtctcgatttatcggttagctaccctagcttaccgatatcttcgataaatcttttcgcttcctcttttataacctagggttaatcttcttcgagatcattctctatcttccttatatctttatcttcttttaagttcgtgatatctagagacttatatattatttttattaggagatagacttatactacgctctgtaagccagcttttataataatctcctctatataggcctattaatttaagaatattccgagttttccttaggagaggctgctccctagaaatcgatctaattttcctagattatagtacttaaaggggattttatctttaaactatttgattccttctttatttaataacgcgattagagtattatctatatagagtagaatctagatatttagttccttatagactataatgtagggtttattaactagtggtttaaatcctatcttttttagtacttctgcgattatactatactaaagatagcctacctaccggagtctatatattacttatagaaggaagtagacctccttttcttagtttaggttatttttcttaaaccctactagctactatataaaaataatataattatcgataatcgcgtttagatatactatagtataatcgacctatttaagaaatatattatttacaaccactatactaagaaacagtcttattatctctccttatataattagtatataatttttatcgaaattaatccctagtctttacctatttctatagactacctagtgcgctctaaactcttagactatattctctttatcgatcttaaggttaaagatctatttccttaataggattattactctagcgggtagttacttaataattttatatatcttagctacttttagcttttcgatttacatttctattatagtatactattagtctttctacttcgatactatagcctctatatatatctaagggatcttaacgttctataacttaagttattatcctattagaggtagggtaattgttccttattctagtcctttttcggtagataatagagtaaaacctaccctaaaaggtaaatttatctagtaatccttaggtactagtcctatctccttatctctatttatagtatattataatcctccttctctactctagttatatactctatactttccctattttatattattatagtatttaggtaggtaaccttttatagatcttttggatcggtataatagttatagtaggtcgaggtatatagggtttgtattaacctatcttatttctagttatcttaatagtattagtataggaaacagtgagtttagttctttaaatactcctagaagaggtaggtatatcactagttctttataaataattctagattatagaagtgatatttattaagtaggttaagctagtatctctagtactctttatataagtacttatactctatcttcgagtgattcttcctatagaacttccttatcgatattatagaatagtttagtgtcctctatatttatagagtttatcttagagtcttattaatactcttcccttaggttagtatactctacaattatcctaaggtaaagattttagaaattttttaatagtatttctattactactcttatatttttaaagagtagttctcctattataaattatattttctttactagaaggctatcgataatctcttctcctatcttaatttcgttagttctattatatatcctaggaattcttatttcctaaaaaataacgtctctatatatcgaaactttctttattttaggattatagatatagtaatagtacctattatctcctttatatcctataaggtatccaatctatactctaggatctatctttattccttatatttaagtttcttttagtttatagatatatactttagagtactatactcagagaaacaataggtttattacctcttagtctccttataggtttattacttttctctaagtaagtattaggactttaccccttaaacgagctagtcggttaataatatataccgctatagttactacttcggtctatagttctattaaagtaattcctatattgatatatattatccttactatctatataatatagtaaccactatatttagaaactctgttctattcgtaggtatatagtattaaggtactaacagttatcgatacagtttttacctaaatagtaaaataaaaaaattcctttctattattatatctctattctattaggtagtaaccggtatatcgtttaaactattcggtctatatcttaagagttaataatatattacttttcttagatatatagagtataacttaaaatctagatatattgtctataataattatcgtatattctttatcgattttattatctttaccgattccttttagtttaatagggtataggtcgatataaagtagttacctaacttttattacccttacttactagtcttaggaaatgattttcttagacttcccttttctatataatttgtaatcaaaatatttggtattaatattatatcctagcttatccttattaacttatcctttatagcttcctatatatctaagtctccggtatataagtttagctaagattaggatatatactagaccttctccttctttataatagatagggtaaggcttatccgctagttcgataataggaatattctttataataaacgtataccctattacttattaattactatctttaattactatattattaggattctatcttatcccttaatcctagtgtatttttattagactaaggagattgaacttattccctggcttatatatataatagacgcgtagtttatatcttattccgtttagtttctagattagtaatataatatcgctatagccttctgcgactacttactgtctagtacttgaatcctaactaattgctattcctagtttatatatttcgaatataataaaaagttctctgttcgagtagatatactaagaagatcctaaattaagtatctaatcgatactattctagaggagttatattagtttatttactattactattctgctaaagctctctttatcttatactattactatttctccgaaattgtagtttcctttattagtggttgctaatatagcgatagtattaaagtttacctattatatctaatcggtaggcttcctactaacctattaactcttatttttataaaattagcttaatatcttctagtactataggctaagcttcggcttccagttttatagtctttcgtctactactagatagaaataatcttttatattataaccctattccctatagtaggaatagttcctattagtagtatattatatcttatagtttctctattcttcgatatactttcttatatattttctatatagtagagtattagttaacttagtctttttacttaagatttagcagttattctactatccctttagtacttttattaccgatactaatatactactattaatattaaactctttgaccttatcctatatttctaagtaatataggaagaaatcttagattattatttctactatagggtttttgattgatttaagtttattatttttaattttaattaagcttcgaagttctataatctcctatagttagtttactataataataatcgcttagtatagtggtatagtagcttttagattgttagctatcttaaactgttattttagtatattaataaactctattattattaagaaatctattctctttattccgataaattgaatgattatagcacttagggctctgtgtccttccccttatatatatagcttatacttatatataaagttattagcctattttattcttttcccacttaatataatatatttagcgatatctaggtcgatatatagttatagctaggtactgacttatatacttagttttatctaagtcttagtattagcggtatctcagtctagtctctcgatgtttttatcgattaaccggtataaactataacttttaagaatcttagtcactattctaagctaattatcgaaatcttctttttcctttaggagtagttctatcttatataagacaaagctactaatagctaggagaccttcactctagtctcctattaagtataaggtatcttctaccttatcctaatctttattttttagtatactaacccctataagaggttggttggctgtttatactagtcctatactatttcctagatctgctattataagcgatctcttatagagttaggattattgtattattaaaaaatgttaatctttttctcaatcgggtggtagtattcttagattaatccgtttttgtagggccggcgaatttttgatttatcgcgttatacgttctacagcggtccgtcctaccaattgtattgttttgtctagtcgcgactctctctgcgtgagtcagacttcgttttaattaatgaatgaagatgcctctttactgcaatgattttagcttgaaaagcaggggtcttataacctgtgactccgtcaacacgcgccggtctgtattcactcaagcctactaccggagtccaggatactactggattatatactgatgcgactacagtgtagtgatgcgattgaagagggagagagttgtcaattcctaaagggcagaatgcctaactatctagttataggggttggtgcctgccgcaccgggctgatggtcaggtgaccaccatgtccaacactaacgaatacagtatattagttggcctataaactcaggtatcttatatacgtaaggtctggctgagcagttgtttactagtaagagtatatagttaggataaagggagataccatacctatatatacccagggtgtaccccaatttattattacctaatagtaaaaattgtgattaattattcgggttattatccctagagtcgatactactattagctatactaagagctagtatactaattctattattaattaaggcttacctagatcaaatcccattagcaaaaaacgtgtgttatataggttgagcgccgggaagtagggtctaggaaaaaagacttagggttagaggctgctagcggtccttattagctagagacaagtgctcataacctaataacgcatctaactacgttatgcctgaaaaggggaaaacaactagtatagattcgctaagatctaatagacgaggagagagaaagagagaggaagagggagcggagctatctagtgatctagacccatataggtgaccgccttccggtcacccaacaaaaagtgagggaaagggaggagtagcagcgaagacgggtcttttatgtcggcggcattgaaggtaggttacgtgacagcgtattggggcgctaaacccaaaaaggcaaaactaacctaatacagtaattcacaggtccgccgtttacaatatcaatctcatacttacaaagtacgaacgccaattcaacactccgtatgcagtatagattctccatctcttgcttggatatactaagtttaggtttctagtccatggatatatgcaaacacggtatggatcgtggtatgttcttgttgagccacgtcagatattcttggcagcatgatatccatcttgtatacatccagtactgaattttggtggattgaaaatcctcgagccccctatcttccacactggttcccttgagattgaaactgttttcctcgagtgcagaagattctcctgaattaggaagtacaatttgaccttaaacattctgttttattatacctccaccggcgggtctaaacactttcaagaaacgatcagattttagcagagaacatcaacataatcataggttttaggacatcctggcgttctctttttcgagtatagtgattatttggagccgtgagaccgatgataccaatgaacgtccgatttgagaccctcgtttatgcacgtctgcttcatcttaatcagttcgttggtatagactctcgggcctcgtcgatatctcaatacctagatccacatgggccttttgggagagttgcatgggccatcaaagtctatggggatatctatgtctacgtagtcacaatctatcatgtacatactaaccctcaacgatccccatctaacataaaaggctccatgttaccttcaatatgagacattctctcatacagtcccattttaacaaccagaacaacctaaacctttttacacaagatgcaagtggcatcttcttcttccgctgtcccagccattccttccgtatacgagaccgtgcaaggctacaaggtccccgtcttcttttcgtgctaccccgccggaatcagcattgccgctcgcaaagtcgaagatgcccttagaaaaatcgacgaggaagcatccgaggaaggtacacgggaaagacgtcgagcagtaatccgacacaccaacccctacggtaacccctttactatttgccactgctcggcgcctttccagacagattagttctgttgtctacgctggtcgaagtaatgtggatccatgatggtgagaccctaatgtgctcggcatatatgtagtagtgtgctcacgacggaactatctacagacgtgacagaggagatggatcatatctcagtaagaccactagaagtttgtaaatggataacccattaacagtttacaggcatgccgagaacacgacgagctggcaaaagttcttcaaatcgacattgacccatcgatcttcgaggctggaaatgtgcgccaaaaggcgctggcggtcgtgctccgaaaggcaatcgacatcgaccctaagcaagcccccgatatgatcgagatgctcagaaaatacctggcaacattcgacaacatcggtggcgacttcacgcgaatggaggagtatatgccctaccggatctccaactgcggctactggtaagatctgtacccttctaagaaaatacatggtaaatgtctgttttatcatcaaggatgtcctcttacttcatccgctggggaatggatatgaccctcagtgaggaggactacgccagcatcgagcaattcgacattgcaatggggaatgtcctcggtctgactaatgactacttcagttggaatatcgagaaagaccaggagacagatcgggtgagaaatggagtggtggttctgatgaaggaatatcataccacggcggatgcggcaaagatgatgcttcttggtgttattgtcgaacaggagtccctggctgcaaagctcaaggaggaaagattgaagaagccggcttcaaaggagatcttgcaatatttcgaggctattgaactttatgttggtggaagctgctattggcattcgactgcgcctcggtatcaggtctttgaatgaaggtagataaagacactggtgcaactctgaggtacattttatagaggaatagatttgtctagtaaaggtcacggactttcatcgactatcatctacgtcgaatatagatgcattaaaaccaatcgatggctgaaaaatgaatcagattaatatacaataaatgaagaagacacgctgcatcgaaatagacaacaaaaatcctcctcgtagtaatttcatagatttcaaatccatattccctcaagaggattcgggataaagaattcgcaacccagatgagctgcttcaccatgagcctggagctccctcagaatctgttctccggggtgaggcccatcggtaagattctccttgacatgaattatgtaaatcttcaatccttccagaggagggtcagtatcagcccaagtctcagagtccggacttcgcagaacatccccgaggtccactttaggtatctgaggaagttccaccgactctctcggaagcggacgagactcaacaagtgactcaggcgtcctgcctttatcggcagaggagcttagcgtccgtttcgaacgcgggctcacttgctcgctgccggtctcgagcgggtccgcgggttcgcgcttgcgctttttatcacccctgtttgaatcccgcacttccatgactctgcgggccagcgcggtgagctcggagactagatgtcgtggacacatgtggccgtacagatatgagtcgtcggtgccgtcattgtaggaacattcgatgaagattgctcgtagcttgcccgtggcgattttcggtgcggcggcctcccatactcgtttgttgtgcgttcccagggagactgcatccggctcaacgtcaccgaagacgatgatctcggagccggtgtgatgatcgcgcaggaagaaggcggagctttcgaccgtttccatcactggctctttggatttggatgggagtagatgtggagagcgagcgggggaatagaaactggcaacggttaggaaattttcgtgtacaaattgcgaatttcagcttacctgccatcggtatggtccactgaaatcgcccttgagggaaacatcaagtggtgatcagaaaagacggtactcccgactcgatgaggccccccattttctggatggtatcgttgcttgcaccggccatggctcacgctcaagcattttgtcaataggccattacaagccctgacatagcctctactatcgccacgaccgaaacgagggtttccaccttccaccaagcgctgatatgtgagtagaccagcgccgccatcttcatccgacaagttaggccagatgacatcgttgaacatgtggttcttgatggcggatagcacggatggcaaagcggccacaggttttgggccattacccgcctccaggatcggtgtgttaatcgccagccctgagatatgatctagatgagggtgtgtgatgagaacagcaccgatgatttcgcgaaatacatgcgctgcatttgcctgcgctgttctgcagggcagctcaagcccctgaaagggcccacttgtcatcaccccccgatcatccttgcattcggggagaaaccgttccatcaatcgaataattcctgcaagaagggtacccgcatccacggctaccaccgagttagaagaccatttcgttgacgttgaccggacaagaatgcctgtgacgcagtcttcgcgaggtccacccgtcgggccctgaggggatcagcatccagaaaagaagcagttgcagggctccgtctgctagaacccgccatcaggcaagctgcgaaaagaacattccatcgccaagatatctacgaaagctcgacatccggccctgcacgtgacgggttctgcaacggaagcgaaacaaatcaacgggtcctgacttaccaagacaatgacgtggaatgctgggttctcagccattgttccacttgtcccgcccgtcctggacatgtgagacacgcgataagctagacttgtcacagcccaagagcaagtgaagctgcccgagcgcgtctaatccccaatagtagacgggtcccgacaacaaaatgtttcacaaaggctcaaatgagttggtcgatggtcgaatcaaggatatgagaggcggctaataaagactgaaaaaaaaaaaaatgaagaagagattacgtcgcgatgcgatatcagcgcccacgggttgggattcggactgctcaaatatgtatgttcaaactgacagcgctctgcatatcatgtgtcatgcacagagcggtctatctccaggaagcagagttggtcctagtagggagagagagtgacaggcgcgaagcgacagaaatccggaggctggctgagtgcagataagagaactccgatttcgcgggggtggagatttccccttgtaccacaatggtatcacaatgtggtgcgcaagacactaatgcacgtaaactgcagtgccgattggaggatattttagaaagcaaagagacgttcgatcggagacaccgggagtggacctggtggattctagtggggtatgatctcaacggagccacggattcggaatgaagatctggggtttagtgagatatcagatcaaggggagacgtctgagggcagcatcagagggagttgattttgggcgatgatgttcacactacgattcatacattacacaacagattcagatggctcgagatatacattgttagtgatcagcgtatgacctgtcaatagatctgctgaatttcaagtagatgtacagaattaacataaagagggtatgcggtcaaggacaaggatagcaaaacgactgtgcccttatacatgaattcattgaatgactccccaaaggtaagggatgatatggacacagtccattccaatccagacagaaagcatttcacaaaaaccaaggatctgccttcgccgactgctataacgccttccgtgagcccgctaaataaaacaacaaagaaatgatcagacaaagcccatcatgcgccacaagatatgttcaaaagcaaagggggaatagatgttgcatcaggaccgatcgttggcctctgaattttgttcattcaagtctctctccaccacagtctggtagcttggcagaagttgaccatcatttgatggacagttagggtcgtcagaagacccagaattagggggacattcacgagagacatcactgccccggcgactgccgtcgggactagaatattctgggggcggggcctctggctcttgattctcgggagctgccgcaccttggccctctgtgtcggccaaagcaaaccggctagagccctcgccagcatcttcatgggaaggaatgtgggtcagctgggcgagggaaatgtcagtcggtgatcgagaaggacctgggctaggcgccaggggaatcctaacacttgagcctgaggtcgcgtagtttgcattctggtaaacgcgttgggagatctgagccgcactctcacggccggactcaagtagaatgctgccttgttcactgccatagggtgggggcggtgcgaggctaccagtcatgggagccaagccccattttttgacattgccttcgatgaacacgaatcccatttggccaaagttcacatggatagtgcaaggcccgttggcaccgatggtggggaagaggttttgggagcgatagttgtgagccacatcttccaatttcttgccgttgcgtgtgaagaagacggtgccggatcgaggtcggtagcctacaccaacaacatcgccctgaaggagtggaggcccgtatggagtggggttaaatggttggttgagtcggcgatgtcccgtagattggtaggcaactgaggttttatggaagcctagcggttgttagcgggaattcctcggcagaaacacttctgcaacacataccaggcattcggaataggggatatggtttcgtagtcacaccgatgccgatcatagtcgattcaggcttgtcgtatatctttgcctcccagtagtaaacatcattctgcttagggattggcaggttggtctgtacactgcactccgagtcgaaaaactcaatttctgttcgtccttccacgaagcagtttgcaatttccagctctggttggaattcccaggcggatacacccttttcttggattgcgaggaactgcgatagggagatgtcggtttgcacggactcgggagggtttccttggacaaaggctgcagacgattagcaaaatgatcaagcgactcgcacgaaaattcatctccagtcttaccttttgctcgcaaatactccgatcgcgccaagtcatccattgactctagagccacctcttcctcgcgcaagaacgcctgctcgtcatcgtattcaccgggcctgccaatgcgatcgagcataatccgcccccggcgggtatatttgaaaaagaaaaagatcgctagaacagcaaatgcgacggcagctgagccaaatgcggacaagatcccaatcaagatgcctttgccggttgacccgctcgagttgccacttgccagcataggctcgggacgaaactccatcgacaaagaggacagcacattttgtagattcgcttggatctgttgctgcgagagtgaaagatcgctttggatgggtgtcggtgatggtaatatcgaggagacaaagccaatcggtgacgtcgtcgggttgcctattactgtgctcagggttgatggcaggcctgcgagcgcatcggggctcgaagcctcaagaccctgcatcgttcatgtgtcaagtgacagcacaaagaagaagaaaaaaaaatcacgagaagtcgggaagtagtgagtgaagtgtgcaaagaggaggcgagagagagagagagataagtgggcgggatgaaatgggcgggttccaagttatctaagacgttttcggccgtggactagagccatgcactaacaatgcaaggcaatgtatgttgagagttggttcctggactgaagatccgggattctagaatgttgaaagaatctatgtctttgtgtctttgtcttagagaaactaacttttcatttagaaatagctgtgatattagtactccgtatgttgtagtgtcaccgatatgtctatctatccctaggataagcccttctctcctcttcccctctcctagctccttactggaatccctctctcccctctctttataccattccttagattcgaagatgcgtgcaaatagaggtgcccaggggtctacggctcaggacgtcatgatcagttccctcgactcctataatatccgcgtagtgacacctacctcctgcgataaatacccaggtcagtacacttctccctagagcgaacattgcaaggtcggaatgccttcatttgccttcatttgccctcctttactttctcacatacctgtttgctactccaccgaacccccgatcggtgatcgtgagactcgagctgacttgaccgcccagccaagcaccatgcacgtaacgtcgcccggaagcttggagcttcgagtggcttgatctttctctccggacagcccacaattaatctgcgcgactccgatcaatcgcgcccattccgacaacgacgatacttctactacctgagcggagtcgacgagcccgactgcttcctgacgtacgatatcgaacaagacctgttaactctttatgtcccggatttcgacctccgccatgctatttggatgggaccgaccctctcacgggaggatgcgcaagaccgatatgacgtggaccatgtacggtatcagagctcgctcaaatatgagctgcaggcgtggctggacaagcggaagcagggcagcgagctgtacctaatccatgactcagaaaagcccgagcatctaccaaaagacctgcctctgaatgtggaacagcttgggcctgctatggacgcagcccgaggcgtcaaggacgaatatgaaatccgcatgatccgccaggccaacaaagtctcgggacttgcccatcggcgaatcctggagaatatccagactatgtccaacgagtcgcagattgaaggatcgttcttgaatacctgtatctcgcacggcgcccggaaccaggcataccagattatcgcggcatcggggcccaacgcggctgtcctgcactacgaccgaaataacgaacctctcagcaagaaaccccttgtctgtctcgacgccggcgcagagtggaactgctatgcaagtgatgtgacgcggaccttcccgcttaccggcgagtggcccagcgactacgtgcgggatatctataagctggtcgagcggatgcaagaggagtgcatccagctgattcgaaaagggacgcgctatctatctctccacgatcttgctcatgacatcgcgatcgagggtctcctggctctgggcgtgttgaagaacggcacgaacctcgagatccgccaatccggcgcatccaaagtattcttcccgcacggtctaggtcatcatgtcggccttgaagtccacgacgtgtcggagcggtcgatcatggctcttcaccaggggttcgatcagcttcagtatcgcccgatcttggactctacctgtctttcgccgtgcactctttccgccccgctgctggaagagggaatggttgtgaccgttgagccagggctctatttctcttctctggctttagccaacgcgcgcaaccagccgtctgcccggtacattgatttcgacgttgcggaaaaatacgttcatattggtggagtgcgcattgaggatgatattctcgtgactgcgactgggtacgagaacctcaccactgcgccaaagggcgaggaaatgcttgccatcattagaggatctgcatagtgtagtattaagtacgttaaatagcggagatatccattcgtattaggttcaacaggctacaatctatcccgtttccgttgggcactacatagaatgtgagccctatgtgggagttacaagacctggtcgggcacaactaaagaaaatatcacaccgccagttttgtagacttggcagcaagctaacggatgtccaaagtgtcactatacaagaccataaacaaagccagctaagacgggccgcatcgcaacccaggattgcatcgggactcggcaatcctaggggtaggatagatagtacaacataggatatggcacgtaaagcgttacacgagatcgggagatcggcagatcacatccatggatgaattcaaagtggataataacatctacgatagactgaacgaaccagcggagtgcaatagtggcaatatttctcccttgattggaggaggattatggagttaatgtgcatactccgtacgtcaatcttttattcactctatttctatttctgggcaatttattattatcacatttcaccatgttgggtggagaagggtaactatattctatatgaggcaaatatgcaaatatgcagttgaatgtcgactagcgcgtttagaactaaatatccctcatttctttagagttcggagaccgtagcggtactttgtacaattccatgcacttctccgggtatcgctgctcgcatcaacgctaacgtcattgcccctccatagtatagccggatttcccgagtttatcgggtttcatatcccggccatttctcgcacccgagagcggctgtgactcttattccctcatatcttatgtatgttgtacaatattatcctctgttatgcggcggtattgactcatttataattggtttaaatagtataattaaaggctgcaagtggaggaaatacgacatgcagcacagaaaagacgtaataatgatatgtattattatagccgaaagctatagttagaccggtccacactcatttaccagaggaacgtgcccgttgagtagaattagaaatcagaagtcaggtgggctattagaaatggatatggatatcctctttgattgatatattgtatgaatacaaatcgagtctgtgtattttaagcaaaagcaaaagacgagccactccgaactggtctatgaaagcaaacgctcataaaaaaaagactccgtaattccataactgcaaccaaggccgcaaaacaaaaagtgaatgagttttgtcgcctgcatctttgtacatctcatcagcatcagaaaggccgttcccggacgcattttatggcacagtaactggaggtctatctcggacttgacccggagaaacctgcatgggagggagaagaagtgttgtcatcgggtccgacgtgtgaagggccaccgctcgaggatgggtcagacagtgcaggtggtggttgacatgcaggtgattttgttcagtggctccaggtcatcggtttcgattcgcgcttcatattcattggggcttggccagttgtgacagcttatcagcctggtgcagcagcttgtgttgttccaatacgcgttggtgttcatatttcaggagcttgaactggtcgtctagttcatggtgccatgggtataggacgaagacttggaatgccagcgctgacgaggcgactccgaagttgatgagagagattccgcgcgtgacccacatggtggaggatattgagactacttgatcagtaactagcttgcgaatgagtgaataagagactcactgtaaagaaagaaatgtacttattagacgttgggtaaagcgccgaggatgagtgatgagatgtagagcagatgaagagcagagacgggtcttgaagggatataagtaggaacaaaagggggcaaagtcgaattttctcgttccttaaatttgacttgcagccttttcggtataaacataattcgatttcggcaggaaccccgatcagtggacctgcgaatcaacgcccaatccggttagagtggagaaaaagtggagccgtatcgtggcggcaaaaggtttccccgacccaaattcttatctgtcggagatggatcgtatcagtcggatccgaagagataagaaagagcagttcaattaaacttacaactcactgtgtttgtgtctcttggaacctcctaagaagaaattgatcatcgagagtaagtgattcctgagtgtcttggactaagaatactactaacgactgcctcagccttgatcgccctctcccagcctctatacactgtccaagccgaccactacatccaaaatggacaaccaaccgagtgtaacgcagcagctgtttggctgggtaaggaaaaacaaatactcgctagctggcgccaccttcgtcgccagcatggtcggttcctttgtgatggtcggtcgcaacccgcatctgacgagcaaacaaaagatcgtgcaggctcgtgtgtatgcgcagggtctaacgctagctgtcattgtttccttggccgcccttgacatgtcagaccgacgaaagccagcgccgcggaaggaagcggtcaagctggctgatgcatagagctagactgtgatttccagccatcatagacgggggtatagacggggagatatagagatgtcgatatgtatttgtatattacagcctacaacatagaggtctaacaaaccagacaaaatcaactcttagatgcgatgtctaattgttcggtactcaattagactctcaaattatgcatacgttgaattcgtgcatcttcaagtcattgaaagcggtttgcttttgatacgcgttggttgattacagccaagacgaagacatatgcctagtagcattgtcgttatattaattcctcggaccgaggtccttctatgactcagacgaacagcggtatcatcatggcttcggccgaggctaccaacaatggaaggacatggaaatcctatcttgtgtgacggggtaaatagtatccatgataaaggagcttatactttggaaagaaggatgctgtaaaatgcgagaagcgcaaagaaacatgtgagaagtcagccctatttaaagatttgcacgtgtcaaggatgtctatgttgtacaaagatatttcatcaaacgaagtcatagaagactaaagagcaacaaaagatagttagtccgaaatctaaacaacatgaaaccctttgttctattattataattcaataatatatccgagatatccattagcccctctcttccattgctacccgcttagccggacgatctccctttctactgcttattcacagtagtacctgattaaaggggaaatacctcttcgaatagtcgacagtaagcagcttagactcaaagaccgggacaatgatgtcttcgtactcatctccgggtatttaggggctaactatacagtatatatatactaagaccactaacatcccaaagccacatactctgttatttattccatctcattatccactttctgcatattcccaacaatcttctgctcctgtttaccgccccaagtatacgaagcagccctgaattttgcattttcaatccactgatcacgaagtatgaagaatctgtgtaatcagaaagggtgatcactacaaacttcgaccgggcttctcacagtttgccattttgttaacttgcaaggtatacctgatgcggaagttgcaaaacatcctcctgtttgagtggttcggtaacacccaaatcaagaataaaccatcttttaagaggatccggtgaatcgaaatcagctgggatatggatgtggtcatagcccgccgggtgaagtgtaggattgaatgctcgattcaatatattttcacagaaatcttccccaatttcgacgtggcgccgttgggggcaaccgtctatatcggtgatgcaggcgtaaatgactactctggagggatggaaacccatatcaagagtgaagaataaggcgagaaagccgttttgttcggatgttgcgcttcagatgagtttagatagacgctaactatttaattatgaggggttagaatctagatgccccgtggctagtgggttgctgtggctggtcgagtgtggctttcagatgagtgttcatgcaattagatccatgccgccttatgaccctgcagtatgcacaaagaccaatgaaggttccaaggttgatatcgagagaaactttatttcaagaggacttgaaacgcagagggaaggagcgccgtataggatcgccgagcagagacacctcccagcttcaaggcatggctaggaacatcttgacgtatgcgatatttctatatgattagtctgatccatggcatcttagtatgactgggcagtcaaacctacaccataaatgggatacgaataagagcagatcaaaggcaaaacaaagctgaaacaggagtataccgccatcatcgatgtaaccgaaccgtgaataagcggcgccgatgattggatttatgtcatcggcgccgatgtcggagttggtggggttggatcttgaaattcacacccgcctttatattctgaagctccctacctgtaatcgagtcaatcattcctcttgatactattgcataatggcttcttacaatattgttgttttcggtggtgaccactgtggtcctgaggtatgtcattggaacattgaacgctcgcggggaatcgaatacaggactgacatagaataggtgaccgctgagggtgtcaaggtaacattgcaagctggaattgggaaagcgcggaatagatgtactaattgaatcccagatcctccgcgtcattgagaagtcccgtggtcttactttcaacctgcaggagcacctgctcggtggtgtgagtatacaccacctacgcgacaaacgccaatgactaacaattacaggcctccatcgatgccaccggctcacccttgaccgacgaggccttgaacgcagccaagaacgccgatgccgttctcctcggtgccattggcggtcccgtacgtctctattctccccccccccccnnnnnnnnnnnnnnnnnnnnnnnnnnnnnnnnnnnnnnnnnnnnnnnnnnnnnnnnnnnnnnnnnnnnnnnnnnnnnnnnnnnnnnnnnnnnnnnnnnnnnnnnnnnnnnnnnnnnnnnnnnnnnnnnnnnnnnnnnnnnnnnnnnnnnnnnnnnnnnnnnnnnnnnnnnnnnnnnnnnnnnnnnnnnnnnnnnnnnnnnnnnnnccaccccgcacaactaagaacaagcctactcacactgcatacagaaatggggcaccggcgccgtgcgcccagaacagggtatcctcagactgcgcaaggaaatgggcacattcggcaacctgcggccctgcaacttcgccgcgccctcgctagtcgacagctccccgctcaaggccgacgtctgccgcggagtcgacttcaacatcatccgtgagctgacgggcggcatctacttcggcgagcgcacggaggacgacgggtccggatacgccatggacaccgagccctactcgcgccacgagatcgagcgcatcatccgtctcgccgccaccctcgctctgcaacacaacccgcccctgcctgtctggagcttggacaaggctaacgtcctcgctaccagtcggctgtggcgaaaggtcgtcactgagatcatggagaaggagtacccccagctcactatcggtcaccatctcattgattcggctgctatgctgatgatcaaggacccccgtaagctgaacggtattgttgttaccagcaacttgttcggtgatatcattagcgatgaggctagtgtcatccccggctctctgggtctgcttcccagtgctagtttgagcggtattcccgatggcaagagccgtgtcaacggtatctacgagcctattcacggtatgtgttatgtcctctttgctgctttctgccattggttctggtggctaattggttctacaggctctgcccctgatattgctggcaagggtatcgttaaccctatcgctactatcctgtccgtggccatgatgatgcagtactccttcaacatgatcgacgtggctcgcgtgattgagcaggctgtgagcaacgtcatcgaggctggtgtccgcactggcgacatcggcggcacagctaagactaccgaggtcggtgatgccgtcgccgccgagctggagaagctgctcaagtagatacaaagcagcctcttcgatgtttctatatgagatatgactagcatagaaaactaaaaatttcaatacccggtttaaaatgcaacatgtatttcacgggcgaaaatatgcctaatgatgttcattcgccggcccaaacccatgcaatcaatgcaaaataattggtatcatgaagacaatgaaactccgataataaaacctccgttggcattttacaaaccaaacaatgccggtacttttgttccttcaaaaaagcccttatcgaatcactggctcacccatccaatccggctcgtctagaccggtggtagtaaatccagtatcggcatcttcactagcggtacgtccccgaagatcatgagctccacgtagggacggacgacggcgccgagcatcagcagaagccgacggcgcagcagccatcttccggcgactatcatcacaagcaaagacctggaatccacgaacatgagtatcctttccgttctgatggttctccatgatgcgcatctggataaccatcgccttgagcacattcccagaatagggatcctccccatcgtcctggctatcgggctcatcaatctcataaaacggatcacactcatcatcatgctcatggccagggtcatcacagttccggtacacgattgtgcgccgacgcatactagtcgtagatcggcgtttcgacttcccagtgtcgttgcgcacccacccaccgtttcgaccgccgacgccctccagcggcacattgacccagccgcatggaccgtcgccttcccatgttgcgaactcgatgaggtcgttcccgcccattcccgctgcgaaaatcatcttggtgggcgtgtagctttcgtcgagctcgaaatccaggtatacgcggatgcgcacgactgctaccagtttgaagaagtggagggttaatgtgtgtggttgtggtccgtcggattgccagtattgggccggggaagggttgcggagggccgcgacgccgcagcccggcttggaggtggagacggtccaggaagcgagcgatgagatctcacgtaggttgggtggtaagggggagggtgatttttctgtagcgcgagaatattagcttgcaatgaatcgtagctgtgagggaacagtacctcgatcgtgcatctcttggtcggggtcctcttcgtcgaattggtcctcggcttcgtcctccagttcctcgtcctcaatatcggagtcatcaaattgcccttcaatagcctgatcgaaggaatcgtcgaagtcgaggggcccgtcgttcccaagctcttgcatgttgtgcccgcgcgggtcgaaatcatcgtcgaagtcgtcgtcatccatcatttgtggtgggagttgctctacccgtgctcttggtcttccaaatattgtaaaagggtttattggtgccgctggatgtcccgccacggcaactgggtcgggtgtgagatcatttagaccggtggaggggggttggtgtcgatgggttgggtttgtgggagtgtgacgcgtgggcggggtctggaattgggcccggaggtttcctggggcattgtcttggttgggtcttgtgtcgcgcggatttggttgtcggcgcaagtgaggcatggttgttccataagttttggagttgatgtttacgcgcagatcgaggggagctccatttccgtttacggttagcgccatttggaaggcatggggtaaacaacagactatttgattcaaatatgaatcctactaaaagaggaaagcatgtagaatgcttttccgtgccatcgtcaaccactggaattatatcgtttatcgtgtcaatgaatgcctttatttctagtttgcagtttgacctgtgctatctattgtccatgcagtttgcgatatataaccacatgtatgcagactatctagctaactccccctttgctgatagctagtgccttcacactcttatgagaaagtatgggccttcatagcgatatattgtctagtgggcctagtaggttcaaattcaaatcgcaagactataaagggcttcctaaaagctcactgaaaccccatgagacattataggacaagctgtgagctgtttgatttgctagcaatgcggcaaaatgttctttatctttcttctaattaaggtttgcaaggtcctcttctgtgtatctattagttacaacaccaaacagatcgtcaatctcggaatccagacggccttcgcgaacaatgtttcgaaagccatccaaataaagcagccgcagactcccagactggaaagcttcctagtctgcaaggatgagatacgtcctcgtggaaagtctgtgtaatctcatcgcaaggctctcaataatggcatctcgtccctcgcgccattctccaggggtttgttttttcacttcagcaaattgggttcgaaccccaaacgtatatcatcacaacacaatacccctaccccgggccacggaagcgcggtatccatttatcttcaaccccaggagaaagcggagcagcgatttccgcaagaacgttgtatacgcagcgccagtccggcccaaagttaaagtgatccgcgttatcagggacagcccaccgggattccgcttcaaatgggtctatgtcgatccatgtattcatcaattcatcgtgctcaggccgctcgtctgcttcggggatagtatgtacgcagtgagacaggggacatattatctgcgcgctatcgaagggcatcaacacggtaaggccgaagaacttagaatagtgccgatttcctcggccgtaggcgtatgagacggatcggcatgattctcccaatctcctccataggaataaagttcaggtcgagaaacccggtgactagtttgctcgctattgatcgagggtttcggtcgagagtaattccatttacgtcaagtgcaaggaccagtcatgtcctccatgatgaatatcggccgagagcctgtagacaaggggtgacaggtcagtgttaacggggcaatgctcatgtggctgatgttattctgaggctgtgcttttacagtggcgataccgaagtaaataaatcagtgccagtagtgattttcgactatgtcaacagcaattactccgtatctatacctttgataaggtctatttagtaaaggtactctttcatatgggtagcagaccctcatatcgcgaggtctgtaaaattcgtaaaaatatgtaaagactgatttagtctcaatacaataatagaccgcatactccgtagtccggatgtccttgaccgccaactagagattgacacggatgataaaccgaatagtgattcaacggtagtatcctagtgcgacaacatggtatccattatagctcgcgtcgcaggtgccaagttccaatccaacacgttcatgacatcggtgtgtagcatttcgtagtaaaccgggatatctagcagcagcactcgcagcactcgaagcaggcgagaccagcgcagctattgtgagaatgtcagccccatttcttattctggttgagtacggctctctaggaagcttgtaagacttacattccacagcagatatcaccaccttcaccgccaccgcggagttccatcttcatggactcggggttctaagggctgattagtggtgattccagcgaataataaccgaaatacatacaggttgctgggagacgacgttggtaggagacatggcctgggtgttggagggctgttccatggccatagaggccgcattccaggtaggctcctgctcctgggtgggcttggactcgttggaagacttgaaccagccgaacatcttggatgattttgagaaaaggggatatggagaggagattcaggaggggaaggggaagataaaggggaaaggcaaataagccggggtcagccgtgtttctactgaaattaaagtcctgcctccgcgctaagaataaactgaaaactctttttccaggacaggcaaccggattatgggccggtggggtagtcgggctgaggtcggcagaagaggattaccggcttatgcgctggcttagaggctatgcttagcacagctgaaatggaaagcgaggtgacttgttcatgtgttggtttctaatttaaaatgccggtaagtaacataaaaactatataggaaacattggaagtccgtgtgaaatcggacctcgaggatggagatacaccaagcttttggtcaagctttacgacagcttggcgcatttcctttcagccctattgttctatgacgtcttcgcgttggtatggggtatctttaatatcgaattataaacatgttaatggcctcgatttataattataagtctgcatgtctactaaagtgaaattactaaattcagaaaggcagcggcgcaagcacaaacctaataactgaaaccaaataaacagtcacgctctttcgacatcacatcaactatccatgccaatattccggtgcatcttgttattctatacggagtatacaaatcaacaaaatatcaagcagacagattcttctcataatgatcagctaggccaaatgatgggcccccgagcaggatattcagctcggcctagtccaaataacgtacacgcggacagtaattgatcggcctggaaacagccagtaaagatcatagtcccaaggctggataacgttgcactcctcacccgctccatggataaagcgttccatcgtgtaatctcattgcagacaacgaacagggtgatgcccagtttgcgacggaccatggtgttcacttcttgagagattatctgggggctaccgtcacctgtgaaacacatccttcgtcagcgctaagcacccttggacggtgtcccgtcttcgcatacggtaagggctgttctcaccgccacgccgacagtaatgtgtgaaaggtaaaagttccaacatcttcggatattatgtcattttcttcaagccagaaagacatcaactatcgctgtcaattccagtcatgggttaatggttaagaaactactccgtacgtactcgggttgtaataataaatgtggaatgtattggtctccgtaatgaaactctgagtgaacgcattacccataagttggtcttatggtctagcggtcatgactgtggattttgacatcttgtttggaatcttccaccgaccccggttcgaacccgggtaagaccttttattcttttattttttttcatcacaaatgatccattctagcgtctattgtcgcacttgtctatttcaaatttagtaactttgcttcttaactatacagaatagaccttgtgaaacttatagctacaatccctgtagagttgttactttttgcacttgagcgaacattccccgtttattcttctacactcgctcatatatttcacgcctaaattagctgtatgaatctgtgtgtgcagatcatgggtttgcggaaagcacacacaaaacgctgatcgcttgcttactcttccacagaattagaaagagcgagcgacgggttaacagaacaggaaggaacgaccatcctacactaatattttctttcttctgtcttgtgaatatatttcttattaactagtcacctgacaaccaattggtcttatggtctagtggttatgactgtggattttgatatcgaatttcaaactttccatcgaccccggttcgagcccgggtaagaccttttctattttatttttttgagggtgctagtaatttgatgcctgaggtggaaggcagaataaggcgggaatctaatcctctataactagttaaagagaactgtaaataattcaatccagcgaacttatcgatagttacaatattttcggtgacatgggaagcattattttccactgtactactaattgttgtcaaggacgttgacctagaactctgaacattggtggtgatccaaggagactaacatatagtaaaacaactccggtcttcttcctatattgagggccattcgagaagaaagacgctagaggcattgtgagttacacgtgtagtgtggactgcggggctaagtatagggttgcatctatattttagtctataatttctcccgaaaatgcattagtatccaaaagataactattggtcccttcagctatcgtcgccctgctctatctttgactcgccaagtgccaaaaatgaccagtatgatggtgcgggcacgagtttctcttggggttttaatataggctacccaagatttcacgacactcaaaatccggtttgttggaagccgaggttcacagaatccttggttggagatgttgatcccccactgaggccaaagcgcggtgttagtgttacctcacttatgattggggatttatataactaaatatgtactggatatagtgcctaatgaattggagcagcctaggataaactccatgacacaatggagtgcatctaacccacgagacttgaaagatccccgcactatagaatgctcggccctagatcgtctcggccaacactgcaccgaagacaccacattggatactttataaagaggggttgtccttcgctctcgcaacccccaaccactacacaaatatacaaatatacaagatgtctatgaccattgaagactgcacccaagaccgggagggcttccctcgtccatttccggatacgcctaccaatgttttggagcagtttaaaatgaacggaaaggtggtggtcgtcacgggagctgccgatggacttggccatgcgatagcgcagggtatggccgaagccggcgctcatgttgccctgtggtataattcgtaggtttttcttcatccaatgtatgtaatcggttaaccatatcaacagaaatgacgtcgctatcgagaaagcccaggtcctagcaaaggaacatggtataaaggcatccgcctacaaggtcgatggtaggcgggcagttggagcttcatatctatagaaggcgacaaatgctaagctttatctgcagtttcggagtccaatcaagtatccgagacgattaccaaggtcgtggcagatttcggcaaaattgatgtgttcgttgccaatgcaggttagtttccgcgggttgatgtatggcagatagctgattgaaaaaggcatggcgatctccaagcctatcttggaacagactctagatgagtaccgaaagcagatgtccgtgaatggtatgaaattgttaattcggcgagataagaatgtggtattaaccaggattagttgacggcattgtgtattgtgctaaatatgctggcgaggtattcgcgcggcaaggtcgtggcaatctcatcattacctcgagtatgagcgcacacattgtcaacgtgcctactgatcagcctgtgtacaatgcgaccaaggcgtacgtcactcactttggaaaatcacttgcccgcgagtggcgggattttgcgcgggtcaacatcgtctcgccaggcttcttcgatacaaagatgggcgccggtccgttcgccctcaaggaggcataccgtatgtcgtcactaggaaggcaaggccacgtgaaagaaatcaaggcattgtatctgtacctcgccagtgatgcatcgacctttatgaccggaagcgatgtgcttattgacgggggatatgtcttgccatgagacgtttaaatcaaacgaatttgcaacgagaggatcaacacgagttggtggcaacatgcaatttacatgacggtactacgtactgatccaataataaagaattggcaatgaactattcaacgtcgggcacactccgggcacactccttgtgcccgaaggcgttttgccccgctatctattttcaggtaccgtttcaataccttttgtttgatcgcaagagcataccgagcgcagctatagcaaggtcaatctaaatcgaaccttatctcttcccgggtcagaggaacgtgctccagttcaagctgattccctaacttggaaaccaggcccggaattctgtcgggccccgggggatgggaccgtttatccgagccaacagccggtcatgtccgggagaacagtggagtagaaatgagtcaacgactcgcaatgaggcgccggggtgcagggtcagcaacggccgatcgtaccggattggcaacaggatcgaactttttccaatgccgtttcacaactggggctatcagacccgaggaatgtcttggcatggtcattggaataggcgtcaaaacacaggagaaaccggctagtcgatgccagggatgcagggtgtcgtcagctacacagcaatatcatataaaatgatataagccacctttttgaaacacggcagacgaagcggacaagacggagaaaacctgcttttggcttattggcatcatgtgattggctgggtagcggcccggttggagatctccttgatacgcacagagaaagcaagtatagagagaatataaaaggatcgaaaagaaaagaattagctgtagctgcggcgtatataggaagataatagagaaaaagaccgaatacagcagaatacagcaggctgtctccagaacatactagaatatactagaagtgacaataccgtattgaaatcggtttccccacgttctatcacggcccgaagtgacttcacattgcgatatcacctgcgatttctgcccctcctttcttcctctgcccagaccacccgttttctcttttgtattttctcttgtcatctttgttttgcttgattttctttcatagcgctgccatccggtgcagccaagtccaaaacggcataattacagcaattacaccggccattggtgtcggctcgaattcgttcccgatcgcccatcttcatctcgccatgactgatgaacgggatttttcctctgaggatgtcgcgcctagagccgacactctttctcccagagaccccacgacccctgcgttcccccggcagacctcgagccccgttgtcctcccctcccgcgaatctttcggagctggcctaacttcctcatccacacacctggggcaggtcaatgctgcgcgacggggtgttgggacacaacctaaatcgtcgatgagttcacaaggaaccggtggattaaatcaagatattatggcaaaaatgaaggcattttcgttatcccgtcaaggtgctccacagccacagactgctgcctcaacggggcagatccccatggctcaaggaggcggtgcaggcggcgcattttctggaggcatgtccccgatcgctactcgtccaaatcctcaaaattggtcctcttcctctgccgtctccgctcctggctctatgtcgcctcggcccggagggcttgcggcgaagcgcatgaagccgggtctcaagctatcggatgtcaccggtccatctaatactccaggtacagatcaaaagcagggggaacaaaatgccgagtctgcctttagcaaatactccgagttcatcgatacgaaggagggcactctcaacttcaaaaacaaagctattctacacggaggtggtgtcgaattttcgtcaggccacagcttcaagatttcattggatgaagtagatcgcttggaagagctgggcaagggtaattacggaacggtctacaaggttcgacactctcgcccgcatctacgaaagccaggccaggggttgggtggcattgttagccgtcctccaggcctcgccgaaccgactccagaatctgggtcaactcaactctccggagtggtcatggccatgaaggagattcgcttggaattggacgaagccaagtttgcacaaatcattatggagttggacattctacaccgctgtgtatctccattcatcatcgatttctacggagcctttttccaggaaggtgctgtctatatgtgtgttgagtacatggacggcggctcgatcgacaagctttacgagggcggtgttcccgagaacattctgcggaagatggctctgtcgaccatcatggggttgaaatcactgaaagaggaccataatatcattcaccgcgatgtgaagccaaccaatgtccttgtcaacagcaagggccaaatcaagatctgcgattttggtgtcagcggaaatctagtctctagtattgcgaagaccaatatcggctgtcagagttatatggcacctgaacgaatctcgggaggcggaatgcaacaatcgggagcgccgagcgccggtacatacagcgtgcaaagcgatgtctggagtttaggcttgtccgtcatcgaatgcgctatgggccgatacccatatccaccggaaacattcaacaacatcttcagccagttacacgtgagtactccgaaacagttttccaagttcaatattctaatcttgtcttttaggctatcgtccacggagatcccccaacactacccgagggcttctctgaacaagcacacgcattcgtcaaggcctgtctcgacaagaaccccaaaaaccgaccaacttacaacatgttactccgacacccttggctggcctctctcatggagccaccaaccgatgccccaccacctgagtccggctctggtgatgtctcttcatcggccatgacagaggacgaagaagtggctgagtgggtgaagaagcaaatgaaactcaaggaagatggcctgctaaagatttccgagaaaccagcacttcatgctgtcgcgctggatcaggtcggcacgggcccttccgagggtgttccactcgctccgtcgcaagatgactgagctttcggctatttcgaacattgcatcctccttttctccgggggcactttcacggcgcaggcgctgtttaccacacttgcatctctattgatttcaccaggctaatgcgccaatgctctggcgtttgggatccattggagcgtgggcagaccctcggcatggtcattacccgcgtgtgctttgagactatttggggaaatcatatacctggatctacgagcattttctgaactgcagtagagataatttgctgcgcccgcccttcatatgaccaggcgcgaagaaacacaatttcatacatgttacctgtcctgaatttccttctgtatctaccttgtaaacaatctggatttttggttttcgtagatgcagccactgtagtgtatcagtttttcaattgaaatttcattttgatgattcgctagtaatcagttcataagtacatatcgctaaaagccgtgttgaaaacagatcatatatatacatccccccgaggttcttattgctgttgaaattgaacaagaactctctcaatcggaatcccctcaagcctctccccaaacctcatccgcaatctccctcaccagactcaacttcttcttctgatcctcgagaagaagaggatacccactctcatgggtgctgaacccacactgaggactgatgcaaacccgcttgagcgcctcctccctagtctccccagacccttccgcaacaaaatcagcagcggagtaaacccgctccttcatagcctccttgtcctccaaatcgcgcaacttggtactgataattccgacgacaacattcttgttcttcggcaagaactttaacggctcaaagccaccagcccgctccgtatcatactccaagtagaaagtatcaacatccaagtcctcaaacaacttcttcgcaatgatgtcatacgacccctcggagaagtgccgtccaccaataaaattgccgcgacacagatgaatccccgtatgcatatcagccggcagcccagcaagcgaatcattgtacagcttaatataagcatccaacagatcctccaccgacccctcattatctgcatccgccgcccacccctcccggaacgcagtagagcagaaatacgccatcccaggatcgtcgaactgcacgttccgcaagccggccgcgtacagcgacgccagctcggcgcgatacaccttcgcgacgtcggcgaagtactcggcgtcgttggcgtaggcgtcggccgcgtacgcgcgcccttgcttgtaccgcatgtggaaccacgccggcgtgatcatcgtcagcttgatgttgggccattcgctctgcgggagcgacgcctgcacgagacgcagctcgtggaggttggactgcgaggccgagacgctgtgtgagagcttgctgccggcgattacggagtcgcccggcattactttgcggtctttttcgatcaggctgaccacgtctgggtggtagagtctgaacattgaggattcggcgtcttggagtcggattgttcctggtttttttgttagtgtgtttttctttgcttgggggaatatcgatagatagatagatagatatataggatagttaggtatagcccggatattagtatactacgtaccctcgaactcatcccacatcaacccccagaatcgggtgcggttgtactcgccagacgtcacggccttgaacccgagctcttgctgcatcttgacgacatcgcggacggcttcttgctcgatggcggggagtccggcggcttcggcggagactccggtgttggcgatcttctcgcgcgcctcaagtaggttagctgggcgcaggagtgagcccatctgctcggcccggaagggtggggcgcttttaagctcgttcgccatgttttttgtaggaaaagctacgcttgcaaatccaggagagttgtttggtataggattattccagggaaattttagttttagttttcaggggacatccctctcttctctatgtgggggatctttttctgcggggctgctaaaatgtggtgctaatggggcttctagtagagcggctatctgagcaccacattttagcaccacacaataagaaagatcccccacatggagaggataggaatatcccccaaaactaaaatttctaagataattatataccaaacagctcttcccgggtagcttaacgaccagaaggtcgcagttccccgagggagacagctctgaaggccatgatgtagaggatatatgcgcgggcgtacattctcccgctcggccaaaagaccattatctctcgctctgacatacccaggaccaatatatatagtagcgcacaagctattggtgacagcagtctttatataccgtagcgctcttcccgaataagagcaaaactataactgattcctagtcttcggcaaagcccgagtcgggcccagcccgtggcccgacccgtacgggcttcgggttgggtcgggcgtagagcctcaagactttgggttcgtgcccttagctactcccacttctgtatccgtggtcctatcgacaatctgtggctagagtactcacaagtcactagtacgctgaaccaaatgctggtctcagaatctggtggtcctgcaaacgtccacctccagtggggagtaatccatgatgatattcggacagagagctgtacctcatggggggtttctgtgaaagccactcagcccatcatgccgtttgaccctctcgttcgtatggctgctcagcaagagcaatatgtgttgcatccatcctctgagagtgcaaagagggctttctcgaactttgcgacgctgactgacaagacgttgaaccatctttgttgctatttataatccaaccctggctatacggtaattaggtaacgcatgacctcggagcaacaagcaagggaaaccagccagctataatgtgtatgcatagtcactttctcaccctacttgaagccagatatatgcatcacctttgatatttgaatgtatgacgcgcttctatactccactatgcctcgattgaataacaaaagagatatagttgtaaatgaagcagtgatctgtgactctaacagagccttggtagtgagtaacctctcttgtgagattgtttggacagcaaaagcggatttttgcggtagtcattcgcctgaatgaatacccccctcttgtaccaggaacatttgaatcacctccaggatcacgctgttcgttcctgggagctgctagccgtctaggagcgcccctaggggtagcctaaccgtagaagtgtagggctgtagcgaaaaaatgtgctgaaagaggaatgaaagagtcgaatatggtctaaatactcgttgctaactaggtgtgaactgctgatgtcagccgttagcttgttggcactggaatggatagaaaacaaagtaggacatttgttcacagggccaggatcggtaacaggaatggctggctcggacatagccacctttccataagtatggggtcttcaagtcatcgtgtactccgtgtaattcggtgacggtaaattacgcaaaggagtttagtatgtttacccccgtgatctgagtagtgtattccctacagaagttaaggaagaggctttctggctagccctttaagtcccgactgggacatcgaagaagtgatctcgcggatatcttgagacacaaattcttcgacttcgtcgttcaaccgcccccaaagatagaacttattgccagacaggaaaattgtgtgccatccgtaatcatcctccataaccggctgtcctggttggagaccatagtctcgagcaattacttgaccttcggagtcggcgcctatccactcttcctgataaagaggatttgatgggttcgaggtccagccagggggatcagtaaactggcaatccttagcgacgtgaccaaaaacaagagggagttagcctatacttactggtggcagagcggaggtcttcgtaggtgacttgacaggcgagaccgccacagaaggtggagtagagatcctggatggaggcattatcgcaacagtggacatggtttcaggagccggcttgtcaggattgtcagttggtgaagggattaagggcaggtctgatgtaattatgtagtttctgccaatccggaccgccaccacgtcaatacaactctctcctttctgcttcctgagcctacaacctgtagaagagagggaagcgatacgaaggggcatggccacctgagcatgctgaggtaacgactacgcgactaccttcactacgccatgataggaaggcggaggtactggcggtgaaggggggtggtcacggatctttgcggtgccactgtgcattgtatcttaggcatcaacttcactaatcaccatctcggtgctcttatcgccgttaaattcaattgattaattaacctatcgagataaaataccctaattgtattattcagctaggtaccctctttcatatatcccccttagggccgtacgaggccatatcgattctccatgtttttgagataaccaatcaataaagcttcatatattcaaacagctgctatataggcggtttcaaaaatagaaagatacgacttactacttaaatgcggcctcttcgagggtagttccttctaggaggaaagagcaaggtagcaacattaggcatactataccttcctagttgcaatgttgtttcatgttacatgccattgccggttcctttcggaagaaaagagtacaatcgattcaaggaagggaaagggaaaatgaaaacagtctacgatctcgactgggttttgtgctcttcctggcgacctcgccacaaaccatgcgaaccccgacctcgcttacggtttaggaaggaacgactcgattggcaagtgcgaggtcgaggttccaggttgggcaggtgcgcagtcggcatcagtcggcagatcgtcacatttcaaacaattcaactcccctaccagcttctcaatgagaattctaagcaaatacaccacattctgctcatgatcatggcatcggcacctgcgtcagaacaagtcctgaatgcttttaacgagattcttaacttgacaagggcttacacttatgatcgccagcaggcaagtgaatcactaacagctgcttaaattgcatgtttcaatccatcgagatcttctaaattcctgctagaccccatttggcacgatgcagtcccctattggggtctcttcgatatgctcggccttttcgtctccatcgttggagttgcgccgagcggggctacaaaacgaaatttctacctcccactaacagcaatgtatgctaattggtgtaatactcttgcggcacctgttccaacgatgtataattgcacatggatagcgtatgggcccggtaaaggtacattctttcttggggcctccttaaggtgtccgttccccccacagcattactggaccgtggaatgaggtaatccaggaagggcgatttgccctgatcaatgatgctgccatgattgagagtggcaacacaatgaagaactgtcctgagcaaagagagaatgatacgttcattcgtttcggaaattgtgccgagacatccattcgttcatctgttccagtaagtcaatattccagtctttaacgatactctacgacgcgaaaatttgatctaactactagataggcacagtagaaaccccgctgcagttcacggaattgcgcttcaacgtcaaggagttcttcccgcaaattacgaggatagcttgtccggcagtgtttggcaaaatgtacgaccactctgtgctaattgtcgagagctgactcagatgcggcgtggatgtgtcgccaattttgatccattggctgatgcgagcggcgcgccgccttgaccattatgttcctaagtttaagtaactaactaacggaggggagaggttaagtgacggtgtattgggacgcttaatcggaaacgacaaagctgaacggatccagtaaatcacaggtgagtctttctagggtagactgttaagttaaataagtaaatacgtaggtttggtctttctagttattactatctggtcgaccgcagaatttattcccgggtatctcaaagaccagaaggtcgcagttcctcgagggagatagctctgaaggccatgatgtaaaggatatgcctaggcgcatattcccccgctcggccaaaagatcatgatatcagagcgagagctctgacatgcccagggccaatatatatagcagcgcataagctactcgtgacagtaatatttatataccgtagcgctcttcccgaataagaggtaaaactataagctaataactgattcctaggtagtcgtcggcaaagcccgggcccaagatctcggcccgtggcccgacccgcaacccaaatggcctcatgaacgggccaaaaccaacaccttgcttggcgagaacgaaatttcagattggcgactcggagccgaagcttactatcgtggttgcctatcatgttttagcccccaatcatttaagatcctttctatgccgttatggcccgaattccattcactgctgcagctctctggcttaataaatccatatttctttgtaatatcaggtggttttggacaccattacatattcagtgttgactgtggcagtactagtagaagagaaaagagtaataggaaaagaaagaaccctattgtctaagataagtgtgtaaaagtgctgctgagtactaaataactagttaactatttaattgataatcttgtagcggtgagagagatatgtagaaggttagattcctacaaacgatcgagatctagctaaatagctaggtgaagcctggcaaaccaggcaacggcatgtgatcggcacatggccaccacaacagataataaccataactaagcattagataaagtgggtaactagccgcctcaagactttgggttcgtgcccttagctgcccccatcgacagcattctctcactctccacagccctttcaatatcacatccatatgctcgctcttcaacatattctatagcctacattcaattataacgtgtagtatttgattttcaattctacctatatatgcataagtgggttatccggaatatgcatgccgggtcctccggatcctgtacaacagtctaccctacaaagattcacccacaaccacctccacttatattttctagctcatacatagcgtggtatacaattcggtatctctgcagattcaaaatagtatatatccaagcgatggcgttctcaaccctcaattttatatagtagggcccccgagcatcactaactgcctaacatctatctggcatattataaattgacaaacgcaatggttgtagaatatagaagagagggattagacgaactcgatataatacaaaatacaagcttaatactagagatcaagattaatgggaatatgggcagagtgtgggtgaatctttctagggtagactgttgtagcgggaatccttgaatccttcctgccacctcacagcaaccatctcgatcgagattagctggacggctataagttcaggaagtgatcccctcctctcttcttttcgttgatcacttcccagcttctctcctttcctcttttctttcctaccggtcagcttctctcctttcacggaaacaaagcaaagaaaaccaccgaacccaaacgacatcatgagtgactccaatgtctgtggcaagtgtggcgcgaggcgccgtggcgaaagcaaagattttcaattctttgtcgccaaatcagtcatcgggttcatcactatgactgcatgcttcgtgctgatgagactgttcttcctaggtgctcttgcgcagcctatgagtaatcagtctgatatttcgttacccgccatgggtaatcatagcgatcagctgagcggtgttgatttcacactctacgcagtcgacgcctcgatgaacgaacaggacgctatacagagctattacagtgccttcgtcaatgaaaccccacctgtccgaaaggagctggtacgactgtaactaccctggtggtggcatcggacttgcttgctgcggcacggcgcatgggattggcaactttgtctcttcagtcggctccggctcagcttcaggatacatcgttactctactcaaggaaatcaactctgccagcaggctcgatgagaagccgcgttctgcgtacatcacgcaggacagcagcaacctatgtgtgtcgtgggcgacctatgcgacgagcaagatgaccagcgctgaagagacagaaatatcaaccttctctacggagtgcgggtcaaaaggctacttttgatagccaatcctcacgacagattcctctctgcctagttcctcttgtccaagtcactcaatacatgtttcgagttttagccacaatgaaaatcgtctcaacgatgattgatctggagcgctttgaaaaaaatgcgaaaattccacacctctctacttttacagatttatcccgttgctcggcgaataccagaacatggcgccatcaaatgtgatgtggctaggttaaggaaccaataaatttattggactagcataatggaaacaagaaagcatttcatctcaagacccaatcggcattatacaaaattcctgcaatgaacaaacacataccaatgagatgaattgaaaaactgaagcaccacaggccagctcaattccaagatgaaattagccaacacaagctgtaaaatcaaagaaacttgccaataaaagaaaaaatcattatcacaatcccctcaccttacttactttttctcccctaatcctagactaccgaacaacttgtcaagtcccaatccgccaagaaggccattcaacaaaccacccagcccgagaccaccgagcagttttccgaccaaccccagaacaccgctcagcagcaagcccacagcggcaatgatttggaaaagtggctcggaaaggagggcccagagcggattcagctttttcttggcgtgaggcatgtcagctatgcgtttgcggccgttctcgatcgttttggtgactgtctcggtcagctccttgagtaggtcggcgagctggtactcttccggggtagcatcacgcgaggcagcgcgcgccttagcggtggccgcgatgcggccatcggggtcgagggcacggatagagccattacattcttggaggatacggccaccttcttccagaagaggtttaacggcttggacgagcttctcttcgtcgagctcttccttaggtgtacgctcggccttttcgatttgctgtagaattgttactactaagaaagaaatataagggggaatatgaacttgcctcagtgatctgttggcaaacaggcttaactcggtcgagggtctgactgagaatatagatcatcttctcagctatctggcggtcctgctcggctttagcctgagcctctgcctcttccgaggtaagatcctcttcttcaggctcaggttccggaatattctccagtaaggtacactcgccaatattgttgccatcgttgtcaacgacatagccgttatcgttaacggttttgccaaccagtgttgccagattaccggaagtcagtttaccaataaggttaccatccgtatcgcgtacctcaccctccttagtgatcttgcggccagacatagggttgatatcgcgctgcttctcttccggctcccagcgttcggccttaccgatagtatttccattcttatcaataacatcgccgtcctcatcgaccttacggccgaaaagatactttgcatcgccttcgataaggcggccgataattcggccttcgtccacaactataccgtccttaccgacctcagctttatcaaagccgtagaactgcccctccttctcttcctgctcctcatcgggtatcagccctgcccggccaaccaccttaccgttatcattccagatttgaccctggctgtcgaccttacagccagcgagacgttcgccttcaataacccgcccaaagacaacacccgtagctggatccacgatgttcccctgcttattcacaactttgtccttaagaatagaaaggtcctcttcagcggggggttcttcctcgggtggctcataaggctcgccacggcccctgacattgccatatttatctgtaatctccccatcttcgtcgaccatttggccacgcaattttttggcaaccccctcggtaagtcggcctacaatagagccgttgtcgtcctcgataaacccgtcctcagtaacaaccaggctctcgaagccggcgaacgggccatcgggaatatcttcgcgctcgtcgtcaggaataagctcagcgcgaccgacaatatttttgccttcataaatctcgccgttctcgaatatcctttttcccgccagctccttagggtagccctcaataatgcgaccgatcggaaagccctccggcccgatcacatacccggccttattgcagctcagcccttccatactggaaaggtcaataggctctacctgaggcgattcaggttcctcccatcgttctgcacgcgcgacgacgttgccatactggtcgagtatttcaccgtcctcgtccactgctctgttgaccagctttttcgcgtcgccttcaatgactcggccgaccctcgtctggttctcgtcttcgacccacccgtcctggccgacgaccaggccatctaggcccgcgaatagccctccctcttcatcatcgtagacgggtattggctgggccttgccgatcatattgccgcggttgtcccaaaactggcccgaggcgtcaagctcggcgccaagcttcgagagcttcttaggatcaccttcaattatttcgccaacaggcttgccggtagtttcatccatgatgtagccgcgcttgttgcacttcagaccctcaagagactcgatcgacggtattcttttgttactctcctcggtgtcgtcgtgagcagtctgttgctgttgctgttgctgctgctgctcctccacggggaacaactccactcggcctatggcgtcgccttcatcatcgacgatctctccctcgccattgacggtatacccgacgagatcctccggatctccctcgacaatcttgcccactgccaggccagaagaattctcaatcacgccaccctcggagacaggcagcccatcgagttcgtccagggtggttaccacgtccttggcctggtccagctccgagttttcctccccagaaaactccgtagattgatcaaccgtctcatccaatatatcaacacggccgatcaaatcgccatcctcgtttagaatctcgccattgtccccgacagtctggccaaccaagtcttccgagtctccctccaccacttttcccattgggttgccgttctgatcgcagatttggccacccttggcgacctcgagacccttaagcgtagaagaatcaggcgacacggtgctcgagtcagtgttctcaccctctcgcgctatatccttcacttgacccgattggctcctaaccttctcgggccgttcggacacggcgcgcccgagtggggccgcagcgccagaagcttgagaaccatcgtccttgggtggggagataggacggcgctgctcgggtgcaccaggagattcctttgtagactttgagaaaggggttgcaggcacggctgtttcttccctgtcatccgagacgggctcggattgtttggtttggagcttgcgcggacccgtttttttcttggaattgaggctcattttgacccgacgtaagggaggatctgaagaccgtttgattttcggttgtactcagtatttactttccaccaaaataggcagatgagaattgagctttaggaatatgcgatagtaaagaattccaagtgattggggttgatcctttatggtgaggttttgctgtgataaactagtttttgcaatcgaaaggcccattgtcttgcatcatagtgacaccaaacaattgtcgccaaagagttttcacctaagctgtgcatgtcatataacaagcgtaaaccgtccgatgtagccaaaatccactttatcacggcctggtttgaatccaacacgccgaaccaagcaggctatccggcgcattgaagtcgagactttgtttaaccaaggctctagatttctttttgaattgaacatcttggaagtaatacaatgacgaagttggtgaatattctagccaaactcaagcaactaagcggcatttcattgaactgcagagccccggtgacgtcggcggcaacgataactcatctgacactaccatcaccccgatgcagccattcgttgggagttcgctcttccttgacctaaatcctcaagtgaaatttggatgggcagcaaaatcttaatgtagcgtgacctggtcgtttcgattacagaatctatggtcatggtcgccaactttccgaagccctcggcctacagaatggctccctggtgatgggcagacatatttctccggagcaaagaatatctcagaaagaggaagaggaataatatcaatattctggtctctttttccacctcttacccccgaccagtcagcggcaccgaggggtagccaatcccctggcttctactttagagcaatacgttacgatttatttgacgactggttaaaggtgcgcttgttgacgctgaatattgaagattggcgtgttagccacgaaccgctttcatcggttcgatgagctctgattatttccggttattacttgttccaatactgctcattggtagtctaaagactatctataccgtttcattggatactgactgcttggtcacattctaaaatacaaactgcaatcaaccaaggatcgatatattacaccttccagcgacaaagccacggctcaatccacattgcctaataaaagatactggcacctaaaaggcgatgatgaggaagaaagctgcgctgcctgcttgctgtttggctgacgtagttgggccgacagattggatcaagatgcctattgaatgacaatgagacaaaggctttatggccgtaaggcctaccacccagttgtcacaatacataatgctcgatgctgtgagagtcgtgtgcttatatgttctcttcgcaacactcatgtgaattccaaggcaaatgagagcgaggaacgaatttgacaagattgatgcaaaagtccacagccgtctcagctggagcccggagcctagttactagtgccagtcagtaaaaatgtcacaaaacattgaattgtcaaaatgattctctgggtccccaaatgctggtagaaaagaagggctcactgacagtaaacctatagtcaaatcacctttaatcttcgcctttagttgaatctcaatatccaaattgatatccaaacgaagacgcaactgctcgtcacgcccgccgtcatctttttcctctttttgttcttccttctgtccaccacccaaggctccgccgactgccttacctgtgctgtcagtcacgccgttcatggccttatcagccgtgttttgcaccaactcgcccgcttggtccacaccacccaggcccgaaagtgcgttgctgccactgcgcttctgcggttcttgctgtggctggcggtgacgccgggtgcgttggcgctgctgaggctgagcctggggttggccatctatgtcgctgcggtggattgactcgacatcggattccggacggtatgagcgagcgggatgggatcctcgtctgcggctatgtgtctgttcaagttcgggttcaggctcgggctcggccctttcttcttgctgttcctcttgtctatttcgttcttgttctggctcttgatacgagtcggagtcttgcttggacgtggacggcttcgtttcctgcttggtgggagcttttttgcctagcttgcgcggcgcacgcttaggcttgttaggagaggtcttcgattccgagctaagggtttgaggttgggtttgttccaggtcagtcattgtggagggaagggatgaagaagaaaataagaaagaggttgaactatgagctagtcggatggatacgatttgcgttaatagtacaaacgttagtgggagtaggtttagatgaagtatgatgcacatttgtaaaatatgtgctactcatttgcactgacattactccaaccgttctatattatcgaacagaccacgggcgagatgggacaattgggttgtccgacgtcaggggtggtggcgccgtatttatcgggagaggagttggtaccagacaggtttagccaagaaaagcattgagaaaccagctgccgatattacgaccggaaagcaaaaaaaaaaagcctgcgaaggtgtatagcggccagtggccgaatgcctaatgttgcagagctgatgccttaaatgcctgatttatgccgcctataactactgtgttttgtaaacggaaggcactattgtcttaggggctaatcctgataaggcagtgtacctcttggcactctatttccagtatgcatggcattaattatagtctcgctacctcttatagcagtggtatcgccccctcccgtagaaagggcacggaggcgaccgcgagcttattcttaggatacttcgctacgctagagctaggccgggggaagatagtggataaggttagaggaagagtaagaatactcgaattggagggagatggaggtttgtatagtaagaacaactttaagatcaggaaataaataaataaacaaatatatacggtcggaatatcttcaaactaccaagacttaggcgaacagagacttacatagtaggaatagctttattttagatgctctctgtcgttgtaatccaggtatttgccagtataaaatcaggcaaaatcaggcattcgaccgctggccgctatacaccttcgcagctcctcgtgtaacgaaccaaattacatggccatcccatacagcatgccatcattgccacttttcactcagtcttttcacgtctttgaccgttcggaaccttctcattactctgcctgccttcaaccaattttcttaagctcaggtagccttttctcccgatattcctaacttctttgcaaactccgaaacagattttacacctgccgaatcccaaaagatgggatcgcttcctcaacttttcttggcacaggatgggaatcaaagcgagatccctatgccaatctcgggaaaatgaccactagcggaatttcggatctcgtcccaatggtctgcctaatagtgctagtgccagagccagaaaagcctgctagccgattatcgagcagccgattttgatattgatgataaaatatgcgtcaaatcaggaagccaacaaagtacaaatagttgggcgaaatgaggatacatgggtttacaaggccctagttaatactagcctgattgatgggagacgcaaatccagaggtaattatatcaatcgtatgactataaagacaacagtattatccatcaattttagaatccaaaaaaccaaatccacaaagttgtaagccgtccactaatagcatcaaaaataacagtctccttcactaggcgttgttgagaccaagtgggttgtcctcatcctgcttctgtcccccaacaccctggacggtaccctgcacagcctgtccagcatcctcggttgtatggccgatgccacctgtcgcaccggaggcagtatgcccgaggccttcagtggctccgccggcggtctttcccaggtcgtcgaccgtgctacccaaggtgtcggtcacgccgccaactgtcttgccgacggtatcggtcacaccgccgagggggccttctaaccaaccatagagtcagcgaatactgatattagctatatggtgttgaatttggacatactgctctcgtcagacatatcggcgattggtaggtttcgtatagattcaagaaatatgagtttgaaatgtacaggttggaaggctattgagactaggctctccgcctttatatatcggttccatccacaacaaatagataaaagccgggtttatgacacatggtatggttgggtgcaaccccaagcagcctgaaattaccaaagtatatagtgcccacaccaataacaagctaacaagtggttatagggagtcccatttgtcgtttagtacatgacagccattcgatgtagaccggttattgaaccgtgttttatccgggtctctaccagccatcgaccctactgctggtggcgctgagcaaacgattattggaactctctggttgcccttgtaattgtgtcttcgtcttgcacgccgatcagatcaaaaacaggaaaatcttcgccacaaaatatttccggtttgtgaaattcttaaatagatagggatattgataaataatcaagtatggctctatgaaaagacgaaagcagtattggatgaagggattgcttgtgacgacgtcaaattttcgttgtgcaggaattggtaatggagccaggatggttgttcatgccctgttgtcaaaaaaacaagatcaactcctattcaattttgagcagacatatttgacgggtaagaggggagggaggaggtgaggtgctttaagagcaggaaacttacaagagagacagggttatgtcaccgtgaatactggccttcagttctatctcaatatccaggtccaattccagcctcagcttcaaacccttctcatctagaatcgatttatccccctcatgggaaatctccatgccaccgccaggtttctcttttgagacttggttggtaaatggctgcatggcttggccatcgtcatcagaatagtcgtcatcgtactcatcgtactcttctgggctgttttcatccccatccatgtattcgtcgtctttctgttgttgaagaggacgcctccgttgctgcagcacttgcatattcttagtctgtggcgcttcatcctcatattcctcattggtgtagctgtcggagctgtagtagtcttcatcatcagcgtcgtcgtcctgtacggggagcttcttttgctgctctttgggcttttcactggtggccataatggatgcgatggctttgcattcgattatagagagaggaaacgtgtatatgcgaaagcagataggaaatcaaatcttgaacctgaaaaagaaaaatcaagatgtgatatgcaataatcgcacgtagggaaaacaggaggacatatcgtcgatatcaagtctatgcggtgtgcaatgacgttgccggctgtcttctactttgctccaggcccaaattactctaatgaggactttagatgtgccagctgcgctgtttatcattacattcgtggcattgcgtgttgagtatccctggatctactgaatccaggcaattgtcggttagaatacccctttcgtttggtcatccaggacgggactaaattgtactgtgtgatgggtcaactccatgcaattcctccgtgcgtttctgcctatacctttttggtcgggctggtcgctttgtatgtttgatactgactcaaccgaagaaacacggcaataccgccctctacgtcgggggcggccaaaaatgtcccatctcgcctggctatgacggcgtcctgcctggactatgcgatagaaaaagcctaaatctgcggatgacattgctaatcggtttgttattggttcccgtagacgtcatattatggctcttggtaatgacatgctgccgattagttaactttagccgacatgttaaattatgtagagttggtcattgtttctattccatgatttcgactcaaatttgtgattcaatgagcgtcggtattgcagccaaacgctagttgaacctctgatttcgatcaccctgctcgaaataactcccatacattttcctaactacatgctcatattcttctttcggtatatcagctggattgtcccctttgaaaacaatgcaaacttctatctatcaaacaatcttgctgatgcaaacaagcaaatagatggcgagtggatcgtaacagcgcgcgccacagccatttggtggggttctcaagcctaatggctaatgcaaagtgaagaattgtgcaatcgagtacctagataagggctgtaagacaaatggtacaaaatggctgtggcgagataatatagacctggtgaccccgagcttcttctacctgcattcctccaaaagtcgatattgccagcctaattcactctctttaaccctttccattcttccgctctggattagacccctcatattcgacaatatcgttttcacgctttcccacagaggctcacccgccatttctttgcaaaactccaaagttgattctgataaagtcagctaagtggtttcacccaaattggacagaggacatatgacaggagcgcaagtcggaataatatggcagtgataatgtgtcggcacaagagatgctatactcctcttcctctagccttcacggcagtgatgactggtttcgacttcacgggacaaaagttggacattgatcttgtctcgttacttttctagatttaataagtgtcctaaaccttctttggggcaactatctactcactgtttatgtagttcctacgattatagatttcagttttgtctcgattagccagagcatccactaatgctctaataggacgcagcttttatgatcctggatgatttgattcaggttgtattctcttcgctcagaagtgctgggttttcacactgtagccaaaccttaggctgtctgcactcaggtgcaagctgaatactaccggcattcaagcacctgtatattaatgatgagcttgcggtctcgctttatcggaaatctgatatgctataagagcttagagatcttaggtacttacctaagaaaaatccagatattatagttgcgtcggacgatcgactcccgttggcatctctaggtcgtggccgaggactcttcttgtcgtattcttatactgtgagactcccttatgctgtaaaatattgttaggccctgattctattgctttgccgtgactacgatttttcttacaagacttactggttggctattctaagctatatgttagattttatcgacggtacggatatcttgtatgaaaacaagctgcaagaaggctatagaaagttttaccgtgccctcaaactagaagatcctaagatgtggtcaatactggatgagctccgactacgcttgaatgaagagcgtcgcctcccagtaatcaaagatttataaaaccgggttaatatgatctatacaactctatgtctcatactgccaaacaagaaaataataaataaaaagggatcacaggtaggccccccatatatattctgcattcgcgcgcagtgcagattgaacaccgaccgtcacaaacaacacgtgatgtcccaatagcgtagtatcaaaagcgtcctgcatagcgacagccaaaaagcctcacatcctatctccataacgaaggacaggtaaaagaaaaaaaaaataggtagcttctctttgattgagcgtgtcatccttagtgcaggggccatgctaatcttctctgtatattttcatttgaccatatgccccgaagggcgaaaagacttccttaaagttcaatataacccgcgttcgggggcagaattgtaccgcctaccggttaggtaaggcacgtgggcggtcatatacattgttatacatgcccttgctgtcggcaggttgattggacgatgtttgttgtttgctgtttgctgttcattgctatgccgagagaagatcagagaattaccggcaccaagatgacaattgagcgtattgtcagtcgcgcatgacatcgatccgggaactctgtgcgaaacaagtcttcgaatttcttgatgatgtgtttgatctcggcatcttgtattggaacgacactagtctctctcggcatagtaattgagcagtaattcacttcagatgaaagagagtgcccatggaatcagatgaaaaggatatcatcttgtagcggggcagttttgtgtgggattactcagcactgcgctatgcctgtaggtgcggggtcatccaatgtcgaacttagggcttgggaagtatagaagtcacaatatctaacacagtccctgttaaggtcaagtccttgaggattggagagattaagatgatctcaacactacgactgaatttctggttaccaagaattaagatatacttcacttccttacagcctagcccaagaacaagattaatcatataattgcttcgcttcgctccgcaataaatatcggaatcttctagtattattcacatatatatcttctttttctcttcttgaaaagcattaccgcatggtcacaagctcctcggcgctagtagggtggatagcaacacagctatcgaagtcctgcttagtagcacccatcttgatagcaacaccgaagccctgcagcatctcaccgacgccaagaccaaggatgtgcagaccgacaaccttttcctggggaccggcgcaaatgatcttcatctcggtggggttcttggccttctcctctggggacaagccgacatcgtagaacatggcagtgaacttggtgtgataaaccttaatcttgtcgtcgccgtagcgaatgcgggcctcgggctcggtgagaccgacgcagccgacctcggggtgcgagaaaacgaccgtaggaatgttctcgtaggagatcttggagtgcttcagctcgacagggccgaagagacggctgccgagttggcgaccggcagcaatggcaactacagaacacagtcagtgcatttattcagacgaaaagtggaaataacgacttaccaggggtcaactcagcttgaccggtcacgtcaccgagagcgtagataccctcaacggaggtgttctggtactcgtcaaccaagacgtgattcccaagattcagcttgacaccagggatatccaagtttaggtcttcgatctcgggggcacggcccacagcccagaggagctcgttgacctcgatctcagagccatcgtggccaatgagcttgagcaggcgatccttgcccttgccatcccgaatgagttgcacctccttgaaaccaccgtggctgcggtgaagcttgacgccggcggcctcgtagcgatcagtcatagtcttctggatcatagggtcgaacttgcgcaagaaggtctcgccgcggatgaacatgtgggtctcaacatcaacagcgttcaggacaccagcaagctcaacggcgatgtagccagcaccgacaacggcgatcttagggggaagctcttccaactcgaagaatccgtcgcttgtgataccgtgctcggcgccgggtacggcggggacgctaggccggccaccggtagccaacaagatgtggggtgcggtgtaacgggcagtaccggagccgtcggccagcttgacctcgatagtgtgaggctcgacgaagccagcacggccttggaccaggtcgattccctcgcgaccccagttgccctcgtaggcgccgttcaaccgtttaatgacggcatcgcgggtgttcttaaagtgggtgtagttcatagaaacgttattggggatgtcgtagccatagttctttgcgatgtgcaacgtctcattgatggtcgcaaagttccatgtcatcttcttagggacacatctgaatgttgtcagaaaaaaaccgtcaatcgagtagaacggcattacaccttgtactcaccccacattgacacaggtaccgccagaccgcccgctttccacgatgagggtcttcttgccataccaaccagctgcgcggcgagcgcttccactgccaccactaccaccgccgaggacgatgtagtcatactgatgtgtttcgacgggagccatattggatggttgttggttctcaggggcggatgacgaagaaaagtgtcgagagattgtagagagccgagagttcgtagcaattgggttcgcaggggtgaagcgagtagagttgatggtcgccagagttcgattggtcaaacgaccaggacgaatttgtccgacagaagatcgggtcagagatgaagaggctcgaaagctaattcgggaggattggatggagcgggagagcatggagagaggggaggaggggaagagggaacaattatatacaggcttaggtgagaggggtcggaaaagacgtggtgacgatatcggggttcgttaatgcgcattggttcttccgtcaccgcggtcgatttctcagcattgattacgtgatctgatctagatccgggacttgatacttttgggatctacactttgtttacacggttaatatgtaatattattgaatttgtggattgtaggtatgggtataggaaattcagcaaagagcgacagggagtgaccagcactccacaattaaagtcgatgcagcacacaaggaaataatatcgatcagaaaatttacaactcagagccagggttgaagcactggagtaagtcaagacttgatggaaaccaacaaaggccaatgaatgttgagagatttttcagatagaaaagggccccagccctatcaatccaaagagagtaacagtaacggggaacagggtatcaaaacgcgatgaatgtaaaaaaaagccatcgagcccatgcttatatctagactccatgtcacaacatgctagagtgacatggccagtctctggggcgagggatagacggtagttggggcgtgggaggtggaagagtgtgttcgaatatttgcgtggacagagatcgtgaaggtatcttctgatgacttgcagatcacgcaatccacacaatgtcatgacatgctaccctgctggtcacattttgcatgcgacagaggggcagtcttcaatgttaaaggcagtgtgaggatcggaggagttggactcgtatgttgtattgcgagacgaggaaacaaagtaagagtgtttcggtaggaggagaggcatccccgactcaaaatccaggaccacggggatcctttcaccttcgtctgggcgctgttgaagcagaacgctatcgcaagaggacggctagtgggtataggcgataacggcaaaagagatgaggcagaagcagagaggtatgtagacagagcgttccatatcggctggagttgaggagttgcgcttcatgtttttcagtatataatagcacagtgatgtggtagtgaattcggagatctgaaaaggagggggtccgggagtatgaagagtccggggagggggtggtgttatcttcttatctgcttatgtaaccgcgttgggccctcaacaaaacgtcacctgactcaacattggatgacatttggccagtcaacaaatagaaagggggtgtcctgatgcccacagtccactattaatctgctggacacgcaaccatatttgatgatgaagccccgtgggctgttactacttagttggctgacaagtgagaacatccaagtattccacgtggtactaagcctcggcaggtcctcgattataaagtggactgggaatttccaagtttgccctttccaaggttgtgcgataatgcatctgaatcgtctatatatagacggttttcgatctcctgagcaatatataggacagcctctcctcgtcttagtgtgtcctcatactccatacaccccttgacggtccccatttgccaagggtcggtcgcatgagctcataaagggcacctagccaacctcaacagcaacgatctacattactactttgcccctagccatacttacacatttaccaaagaacagcccctgtccagcgtaatccataacactccgaaacctccacattcacggagaatgaagaatgcaaggagatactaaaccacacctcctatccaccaatgaaagcaaccatgagcggccttcatacctggccaaacaaaacacaaaccaagaacgcgccttgccggccaatggagcaaggcatctggcctctcgagttctccttcgtagtcctgattaattagacagaatcttgccctagaatagtccgggtatacatgagccgatcttcccaaacacgttctcatcacctcaatatcacgccaacgatcttctaccagctaccatatcatcaccgtcataatgcgtgtttcagccctcgccttcgctgccattctgtccctggtctcggccaaacagatcaatatgcactgtaacttcgccgaggaccacaccggcatggttcagcagccctactgctgccgtgatttggtacctgcacggggaaactcgaaggcaaatgaggcattggactgtatgtataacaatctcgggatatttagtcactgggtttgtctaacggtctacttttctaggtgatcaactggaccagcctcagctgtgtgaagatcagtctcggccggcttgctgctatactattgtgagttttgttccagtcaagttggctttcggagtttgctaatctggtttcttctatttttctcagggcccgaagaagatctgtaccggccatgttatcttccaggatgcagaggatgtttagagtgagaagggtacgaaggcacagttgaatacaatcgctttatgacttggcatttgacgttttgacgtcaataatttctcgtgaatagacatcgaacatatatcacacttcgcttctggtgcttgaatgaaatgacggtgtactataacatggcgcagtctagtaggatgtttgacaaaactttgcctattgactaaaagactggacccaggagacagcagcataggtaaatcggtcaagccgtataattaattgcatgaatcaagtaatgctagaataacgagcgccaaactccacatcccccacgcccaaggtgctatacatagtcaaccttttataaatgcagccacatcaatcggaaattaccccaagcatctcctcggtgttcctgcgaaacagacgctccgctagccccggcttggtcgcacataactgcaagcaacattcggtgaatggactgatatcgacacgagagaatcgagtgtgtggccaatcagtggcatagatgacccgattaggtgcaacagataagaactcgcgtgccatagcctgaaggtcacgcatttgatggtctttgctgagtctatacggtgcagacaccttcacatacgtgttcccagcgcgaagcagagagattaaggacgagaacccttgaaggttatagggattgaaagctggaccatcatcgtccctcgaggcgagctcggggctgccaaaatggtcgatgcagatgcgcactcctagtcgtgggatgatcgcctcgaccatcgagatcatcttgaggggaagatatatctcgataatccagtcgtggagccgggcaagcttagcatgctgaagtaaggtctcttccagctcggtcttatccatcactttccctacagactgaaggttgattctcagtccacggactccaagagtatgccattcgtttaaagtctccaatttgacggtggcagggtcaaccacgacaacccctcggccgcgcgagggcccaagtcttcgcaatgcatctaataaacatgaattgtccgtgccatagactgacggttgcacaaagacgagattctcaacacctagtccggactcgaaggcaagagcttcgggtaacgtatgtgcggtgggtttatataccgccgttgaagaaataggaaaacgctcaggttccacaacatgcatatgactatcccaggactttggaggcagtctctgcttcagcgatatacttgcggacgagacatgtgttgaacgccgttgctctaaccgggtggaaaggacatcaatcaatatcgatggaggcccatggagtatattgggtttggcctgagcagtggtcagcatcctgaatagatcccaagcaaatagagagggtaggcagagtatagaaaaaagtcaaaaatcaagccctggggaaatactcacagaagagcaactccggcaaggcgatatcaccctaagaaaagacctaggaagaaccatgctagtttcaccgctcaacgtttgtggacgttgatctaagtgcctgcactgtaggggtgctgaaataaaaagcacccatcggataatatgtatggattacgacgtgtaggcctcgtacgacccacccccctagcacccacgcttgtggccagttgcaggggaaaatcgagctcggaagttgtccgtcaaggagacgctttcaatccgtaagcagccatctgggcctgttaaatgagctgagccgtcaagcggagccaagaaagtggataggtgcggcatgatccgacattgaaaaatggggtcacttggaagtaattgtaatgcgaaaaagcaatactcacggagtagagcaacatgtagttagacaatatgcagaatatcaattatcaggtaattagtgtcctaatccttgtaaaagaggggtgaaggacaaagtacggacgttggccgaagttctatttagctcggatgccgagctcccggtcttcctctcatgtccactcccagataacacttcatttgctccccggatttatcgaatacgcccccacagctcgcttatacaatttaagggcaatgcgatggacgttaaaatggtcgaccaatccctattacgccctggtgattgctgtcattgcctgcggcgggatcccgaaaggtatgaagacccttccctgcccccaccactagactggcttatcggacaatgatttgcgataatatactggtagacatttgctgattgcgcattatccccgacaggctatgacgaaggtggctatagcgccagtgtctccctcccctccttcaagtccgactacgacctcgctaaacacccggggttcgatgataccgagctagcaaatcgaaaagcgaacatctcctccttcaacgtgctaggtgcagcacttggtgcgctgttagtccttgatctcaatgatcgacttgggcgcttggtggcgtggcgcttagcatgcgtcgtgtgggcaacggggacattgatccaggtattcgcatccggtatatatggactgctcttgtttagtcgcatatggggcgggttgggcgcgggcgctctaacggtaactgcaccactatatttaaccgaaatagcccctgctaagacgagaggtctggtggtggggttatacatggtattcctactggcctttctggctatgggtaagctttgaccctctatacatcctacattgtatacatatccggctcccaatctgattcgctgcgctttcttgcaggattctttatcaactatggtgccagggtccatatggccaccgcgcgaactcaataccgcctcgttcaggctgttcctttaatccctgtcggtatcgcatatggtctgtcgtacctttgccctgagactcctcggtatcttgtctcgaaacagcttcatcagaaagggctggaggttctggcacggctacggggtagggatatcgatgatcccgaaatcacaaaggagttcgcaactattgatgcacgagagcgagagcgacagacagacttagcatatgtctcccattgggctatcttcaaggagacacagatgaatccgaattacagacagcgcttctggctgctaatgaccatgcaaactattgctcagtggaccggcgggaacggcatcacatactacgtaacgagcatattccaggtacgtcaatttcaacaagcaatcatcagctataccaggcaacaaaccgctaatatatacgaaacagtacgccggcctagaaggcgactcaacgtcccttgtctcctccggcgcatacgggatagtcaaactaatcttcacaatggctttcacatggggtctaatcgacctcattggtcgacgccgctgcaccctcgccggactaagcctgcagctgtgcgcacacatctacatgggtatatacatgggcctgcgcccaggctcggaagacaacaaagccgcctccaacgcagccgtcgcctcggtcttcgtctacgccgtcggctggtctatcggcctatgcacggtgccttacctgtacggtacggagatcttcccaacgcgcatccgcaacgtcagttacgcgattagcatggcgctgcactggttcttccagtttgccgttgtacgagtcacgccgaatatgttcgtctcgctgcacgtctggggtgcttatctcttctgggcacttatttgcttttctgggctcatcattcttggtgtttggatgcctgagacgaagggtgtgccaattgagcggatgggggatttgtttgacgggccatggtatctacgctggcgggctaagccgagggagtgggatcttgcttcgccgactgatacgctggagaatgtttcatcgaaggacggttgtgtcgttaagtctgccggttcggccttgtgagggtctttttcgttatttccctggcatcccattgacatatatatgctctgttttgtatatcaagaaaaagttgcaagacttataatgcagtgcaatattgcctacaccgattgacactttggaatacattcaattatcctcattggctgctgacgtgatatatctatctcggattgatcttttggcagggtactatattgtgtgtgtatttgggaatcacgagaacaaaagtcgagtaatgctatacaagatcatagaagatcagccccagccctgatcaaagacaggcgtcatattcgtcgtgattggctgcgcatacgagaatgcctcatatacctcaggcgtaatttcgtaggacccggggtcattcatcgtcattccggcatttggcatcccgcccagcaagtgcataggcggcagctggggcatttcgcccatgttcgggatgtcgaaacctgatcctgggtgctgaaaggtattgtaggctcccatcacgggcgggttttcagggtcggtgttttggacttgcgtggctatcgatgcttgcgactggtggtgacgatggcctggagagacatggcgggattggttgctgcctgctgagggggattgactgtgctgagggtggtggggatgttgatgtggggattggtgatgttgggggtgttcttgtttagtctcaggaatgggagtggggattagtccgtggatgttgatttggagtttttggagctccagggagatgaggctgagcgctgttgtgataacggggttggcgactttgactctctcaagggcgaaaatgcagaacttgagtttgtctagggttcccggtgcggcgtacttcagggcttggatctcgagcaggaaaatcgatgcggctgtatagatgctgtatgcgagagagagaacgacgtggctgtcgccgaatgtgcggcggtatagatcgaagagagataggattgatgttgctgatgccatgcactgtacaagatggttcgagtcgtacgcctcggggcgggctttaaccagctcccgagagcagaggattgggcggtggagaaggatgttaatagtatgatatagacagctagaaagggctgagttagaactgtattctaattcacgcaggattgggtacatacttcaaaatcacgatatggctcggtggtgagtatggaggaagatctaccactgccaatttcaagtagtccggaagctcatcccaccagtcattcagattcttggcttgctcctgaacacagtcaaagaactccgagtccgtactttggcggattgggtcgtatatgtggattagaatctgattcaagatttccgccagaccgcacatcttcatgaaacatgacgttgaatgcgcctgcgtcggcggatagtgagcaccatcagtgaagctaaccccatgaggtgtccatatttcgatctcagcggtgtcatcgagaatcatgcgtggcggactaacgcgagagtgctgcatcgtcggggcccggccgaagtacaatgaaacaaccttatcccagaaataacaactccaaaatagacggttccggatttcaatatcctcatcactcaaatgggcagatcctgaatatttccggctgtcgatagagatacccaagtcgtccagcagccggaaggccatgccactgtatagccaagcttgcgtccgatttccacggccgcattcctgggcactgagaaggagtaatgtctgaatgctagggatgcccgcataaccaactttgagggagccgaataccccagtcaatgcgcgatgggagaattgtgcaccgccgtcataggagtccagcagcgggccgacctgaggctccgctttgcaccagcgtaccgagtgcgaaagaatggcattcaataaaacgtccgagtaataagctccattgattttcatatcacctatttggggaggttagtgtcatatgttgtctgaaatgacaaggtcgaacagacgtgtaaatgcaggacggtagacaaaattccacagcggctggatccagcaccaatgcgagtcgagaagatactggaaaggctcctgcaggactgtatcagcatatgcatcccttgaacaatataatccaccaggacccataccggcatagcagccatttgctcgaatgccctctctcgccatgcgctattaacaagccgctctttgcgcccctccagttcctccgtgtaatgtgaagtcggcgtcgttccactcaccagcccactgggtagctggaacaaactagtcggcccgtgaaatgagacgcgaccgtcattttccacattgagaccctcaaatgcccgggtgagatcttcagcatcgggatcgatctttatccttggtccgctcgagctggactcagccgacgacggcgatctggtcttccgcacctcttctccctcacgactcttcgataaagcatcctccaactgcgcaaccctagcctcaagctgttttgtgtaagataaagtcggggctctatgagagagacaagagtgtcagcgactgcgacgcggcaaaggaatagaataaagaggaagggatcgactcacaagctatacacacactgctcgctacgcgcggcgcatcgcgaacacgacggactagcgccgttacatttaacctggcgagtagttagctcggaaatctcgggtttcgtccgagaggatccgcacgtaccttgcgtttacgacaggcctcgcatgagaaggcgctcttccgggggagacggggtttggaaggctctgccattcccgatttggcgttttaaactcccaactcgtggataaatacccctcaaaaggtcaaaatgaaaacaggagagaagactttgggcccctacgtggggcgcggggatagcctttttagaaaatgagatttgacataaattggggtagaagactttgattggtggaggatttggagatgaggaggcatctgggctccacgggaggttatttttatataccctagccttaggtagtatgtggtagttatgttgtacttgtacacttaatagccaaggcaattatatatcaaatgctatttgcatggtattcaattgtacacacgattcatacatcccttatttcttccctttcttgaaacctggcttgcccttacccttgcccttcttgggatccttagcagactcagcatcacccttgccctttttccacccgatattaccatcgtgtctcatctgcgcatcgtcaagacgcttcttgtccttattgctaagcttgacattgcttctcttggtattgggaccgttcaattcgacggcacccagcttgcgagaaaccttcttgtccttctcggtctcgaaccatgtccgcttcggccgcgacatgatctcgtttccgtgcttcatgaggttctcgcccttggtgaattgcatctccgcttgagagaactgcttctcggtcttctcctcttgcaagatctcggcaacctcgtcggccatatcctcggccttttgcgcccagctgtcggcaacagcttgctcgaccacacgactgacgatcttggcgccttgggccttgcctgcgcggacggcaagcttgacgaccttgcggtcgggctcggcagcaatcgtgcacgcacgaccggagcggccggcacgggctgtacgtccaacacgatgcaggtagatctcatggctctggggagcctcgtagttaatgacggtctcaacacccttgatatcgagaccacgagatgcaacgtcggtggcgagaaggaaggcaaccttgccatctcggaagttttcgacggatttgatacgctgcatgggaggttagtggtgctgtagatataggacaagagttgttgttacatacctgttcttggctcagactaccgtgtagttctgctgccttcaagcccaataggccgaaaatgatacggacgcggtgagcttctttcttctgtcggaagaagataataacgcgctttgagtaggcctctttgcacaggtacagaaggtaaccgagacgcttgtcctcccgtccgggacggagacgcacgaactcttgaataagggtggatacagtgtgcttcttggcatcaaccatcaagcgcattgggcggttcataccaacacgaataagtttgtcaattgagtctgtcatcgtcgcggagaagagcatagtctggcgagatttgggaatcgtggtgagaatctcgttcaactcatcggcgaaaccatcctcaagcatacgatctgcctcatcaagaaccaaaatctccagggtatcgactgtgaaactgggcgagttgcgcatgtgatcaatgaaacgaccgggagtggcaatgatgacatcggggcgctttttgagcacattctcctgctcgcgaagactgaaaccaccaaccaattgacagaatgtgacgtctgtgaaggtggccagtttgacggaaacattgtaacattgaacagccaactcacgagtgggcatcagaatcacaacacgacttgtaggaaccttgcggggacggaagaggagacgttcgaggatgggaacaatgaaggcagcggtctttcctgaaccagtcaccgcactaccgacgatatccttgcccaacagagcaacgggaatcgccttgcgttggataggagtcgggtctgtaaatccaactgcggcaagacctcgaaggatgggacgggaaagattgaattcttggaaagtcatcttggccatgttggccttggtgtcgaccttttcttcgggggcaaagaacgctttgcgcttctctgcttcctcctcgtccacctcgctctctacatcggactctcggtctgagcccatgtcgtcggggtgaccgacgggtgtggcgacagagtcgttatcagatgcagcatcgtcatcggaatcctcattatcatccttgtcctcgtcgtcctcctcgccttcgtccccagagccaggctcggggccctcagcatcactctcatcctcgccatccgcacccatgccgaaggcgtcgtcagccatgagctcatcgtcgttgaagtcaacaggcatttcgtcgcccgatgcagcatcgtcttcagatgcgctggcgctctcttccttctcgacagcgttctttttctgtttcttagcagcagcctcatccttcttggcctgcctccgctcaatgatatcgtcaatatcgacagctttcttgtcgccggaacgcttcttctcgttgtcatcaataccccaaccatcgaagccttcagtgacaccctggttcgcgacaccgccaacatcgaactcgaactcggggtttaagacgccgtcgtcttctgttgcatctgctgccgcatcatcgtcttcctcttcagactcgggttcagctgcgggctcggcattcttcttgttcttcttggagtttttcaattgcagcttttcctgctgcttctgcttcttgttctttggcttgactgcttcgacctcgcgcttgcgctttttgttatctgttgccggcgcattatcgtcttgcatctcgttgtcgtcatcttcttcttcgacagggggttcgttctcgtcgtcggaaagcgtgaatacgaaatcatcgtctttggcggaactccgcttcgccgattgaggagccattttgggggctggcgcaaattccagtgaagttttggtagctggatgccttccacactctctcaaacagacttaatagaaaattctagacccccaaacactgtgcaagcaactcaatctcgccgagaagaaatggatcaacatgcaaaaaaaaagttccccgggcggtgacaagaaaatttccgatgacataatcaaccgctttgagatgattgtcaacggctctactccacggctgcctggttgatgttctatcccattactacaaggctattaagaaagaaagaatcaataaaggcgtactgtctcaatcaactgctacctaaataggcattcctccctttctcattattccccccgtatgcccttccacatcgatctttttttggtgagacatccaatagattctagacacagattcatctgtctctcatttatctcattttcttttccgatttttctgtttctgtttctgtttctgtttctcttttccttccagactgtcgttctctccctgtcgccagatttcccgaagatgatctccgtccatgttctcgttcattcgcaggctcatcagaggtagttaagtatcacatgggtagcactatcctggggctgggcttgagtctggggtcggttattggtcacatatgtggccttgaggcgacgggccatgtaagtaaggtcgaaactaagaataggcgtcagtaaatgcaccaagctgaaagtgaaaacacaagatgagacccacccattgccacgctccactctcgcattctcgagtacgcccttgtccttgaagccaaagtccctctccaaccacttcttgatccaggcattctcctcagcttccgcagacgttgcaatggcgcaaaccattgatgtgaaggggtggccatagcccgcaccatactgcactgtgccggtttggtcaaactcataatcggtgctttgcttataggtcccatcaaagcaagagaggaccatatcgaccagtgcccgtccgatgtgctgattcttgttgcccttttggacgaagacatgcagttcacccatgtgcttctcagcactattgccgtgccgatggaattcgacataggcgtagccaaccacagggtcaatctggttgcggcacaagcgcaccggcggacgtcgggcagccacaacgaaggggagattgttatcccggcaaaattgaagaagctcctcaaactcattcgcctccatagattggagtttgctacccaaagctgagttttgtgcataccacttcatgatttcaaggatagaagaagtatcatactgctctgcggggcgcaggtagatgccgggtggaacgacttttgaatctggtggtagtgctagccaggcgcggtgagccgcagtgcgacgcaggtgctcttgttgttcctgctctttctttattcgtctttggttgaccttccccaggttgtagacatagccttccgatgtctcgtgccaatgaaggcgtgtctgctcgtctttcatgttcctgggggtggggatatgcttgatgtcagacagaatcatagaatgctgcccatcggggatcgcggttccgtcaaagaaggcaacatgaaagatatcaacccgacttcctgccggaagctggtcccaccagctgcgaaactgctctctgacactcgcgttaggaagatcaaacgatgaaatcctgtgtctgagttctcgccattgattatctgcttcttgggtgtcccaagtgcagtcatcaggaagagttcgatcaggctcgtaaacagcttcgttgcattctgatgtgagcgtgaggattccatcctggacaattgggaagatacggcgagattttccgtatgccttggcttgaattttctgccggacattacgctgggtccgaatgtccacattgttggacgatttggccttcttttcgattcctccaagttcatcattaggaatgaactcgggtgggtcagctgcccatggctcaggttcctgaataccttcggcattcctgggctttgcgagcaacttatagacactgctgctcatatcggccccaggtccatccctcgctgcgggaagcatctcagggcaagagtgactgtcgttgtccatgccgaagagaggctgctgcacaggcattttctttctcctgcgtttgtcaaactgtttggacaaatcccaagtctgtgcccagctcagattgtctaagctctgtatcagcttgtttccccccgtctcatccatggattcaaaagcctcaagcatagctgaactagaggaatttgagagcactgtcgattttggcttgttgggtttctcaggcgacttccgagaggcagcatttctatcccggaatggcatagatatttcaacctcctctgccatatcgatatgaataagagtttctggtagatgttgagtcagccgggattctagaacatcactcataccgcttctttggtttgttcggcacgtgtgtcacctgggggtggcattgtgtttgttactcaaagagtgcgacataaaatgttcggtaacaagcatacctgagtaatgggatgtactgtagtcacgagactgcagagcacgttctgtattgcgaatatgctgactgagaagaataaatgattgaagtgatgaaaggcggagaggcagacggagaggcaggcggagagatgaagatgggaggatgagagtggaataggcgaagaaggagagtgagggagaggaaggagggagggggtggttattacggcagctcgtccatgaaatgccagacactttgggcaatatcaagcatgtcgctgtgtgacatgacgaaatctgtttcgctgttcctcttcgcgcggaggtaacattcctggaatggaatttggattgatcccgaaatttggtggtcctcagaatcgtgatttcggtttcgaacgatccacatcttttgaacggacttgacggaattcccttcgactgcccatttctcaatggtgatagtccccctctcagtagttcttatagtcaacatgacttggacttgctggtttgactcatggaaccagaacgaagcatcttccttcaatttcttgagtgtttcagaccaccctgcctccacaaccaccgttggccattttacatctctgttaggtgggtaaccttgaggcctccaggtacaacttggtttcttcgcccttgtggtcccctcgacactcccgccgggtaccagacgactctcctgggccctatgccaagaagcgaatatctcaaggaaagtaccccatgaggtctcgtgtatagaagaaaccgtcaccctgaggataagagtctgggaggagaagtaataactcaagaatgctttttgaagtagcctgtctgcagacttattgtcgaaatcttcccggaaggcacgcctatctacgtgatcaaatataatatatgatgactggcctttcctataacgctttgattcaagttcaaggcatctaacacattgctctgcatcttgatacctgtatcttggtgttgtagcaggaaggccttcatttcttaagatatcttccgccatgatgattgcggagcgaagcgaagcaattataaatccgtagttggttgttgaaactgatgggagcgatgaaatatatggcaatcttggaagcatgacggtcaatgacgtgattaggaaacgtagccctagaggtagattgccaggtagtatacaagacctctacaatcgtatcaacttgccttccatgtcaagattctttaaaaactagtacaaaggacaccaaaaaagacatacaatggttatgaaccatgtgatatacaacttgggggtatcataccaattacggtagacatacctaaagtattcgctactgatatgtggcggtctcgcatcaaatccaacatcccttaaaagcggtctttaccaatggttaccgagaatacctgtttagcgtgtagctggtccccaacacgtcaagacgcaggtccaatacagtgcctattgaaaccatcaaatatagggggaaatacaccagcatgatattcagataaatgtatttaaatataaagtcactttgtagtaacgggaaggaacataatatcggccgatccataaacacgtcaaaccccatcttgagcctggcaagatttttccctttccaactctctcaaaaaaataccctgcggtatattttcgcagccatgttgtccatacttcggaaagcccgcttaaaggataaagaaatgcggatattgatgctgtatgaactctgatcgggtcgttcaggccgagatgctaatgattgcaggggtcttgataatgccggcaagacgaccatcgtcaagcgaattatgaaagaggatgttacgacggttagcccgactctaggatttatcatcaagacaattgactttatggggtaatttcgatcttgttaatatcgcgagctctgctaactcgccgcagatacaaactcaacatatgtgagcttaccgggtctctggtggggactgcgtactgacaacactaggggatgttggaggacaaaaaaccctccgatcatactggaaaaactattttgaaaagaccgacacgctagtatgggttgtcgatgccacagatcgactccgggttgacgattgtcgacaggagctctcgggtctgcttcttgaagaggtacggatgacgtttccaccccaacccgcaaatcttaagagtgtcaactgaacccattctaccagcgccttacgggagctagtctattggtgttcttgaataagacagatgtggaacattgcatgggcgagcaggaggttcgagaagtaggtctaaattcctcctttgaatttcatgccgtttgccggaggctaatgtctctgcagcgtctcaaattggattcaatcaaaacacacaagtggactatcttgccatgcagtgcaatgacgggcatgaatttgaatgaaggtctagaatgggtggtacaagatgccaaggaccgactgttcctttactagtgaacaggggaaatcggcgtgtttcctcttgatatccacgctaataagatatttaatagttattttaagtgatcttattaagtttttagatcgatctattcatatatctggccaacccgtgttgtttcccctgttatatctgaactaacgttcggtcgtattctaaaaatctccaatgcggtgcattttatgttctaaagaaatagcctagtacatgttaaattgtaaaagaaccaggctgcccatatctgataggctagagtcaaagaatagaaagacaagagttgaaaagtaacaagtgtctcctttcatggattctgtacggagcgcggagtacaacctaacgttatgcaaggcacaaactgatatatataaccataccaaaatagccacatatgacccaaccgtgacccaaccgtgacccaacctatccctttaacccctgaaaagaagaaaaccaaaagaaccagggaaaaacgagggaaaagccatggaaagagaaaactgcggggcccaatcgctccacataaataatgggagtaaacaaactcctatgtgtgacggattcaggtttggtcggtatagacgcatctatccatgtctatagtctagaaaaaataataggattgtagcaaaacagcaggataaatagattaaaaagatccatgaaaaagtgatgtgtgagccaatgaattggttgatcatcgccagtcccgatttaatttaaacagggcggagaacacagcccttcttccaccctacaactcttcccccctcatttgtttcgtttgaggaggcgtgcatgaacgccgagagtcttacatcatggctgctcccaccgagagttccgaggatgtcaatgatttccttgagcgcatccgggaactaggcgaccgccgtgacaaggaagacgacgagcggaccaagaaactagaggaggagatcctgcagggccggaaggaaaggcaagcccggagagctggtatatactccttcccttgatgcacgcaatttctgcactgtcacggcatctgctgcaggtcaacaatgtgctgatatctggatgactcaaaaaacagagcgtgcacgatcactcgccctcaccgacgattcatccaccctcaatatcgcacgactgagcacttcatctatcagcacccggtcgatcgaccctccggaactccttgagccaacactgaaaacaccgcaaaccccaggacccgagccaccgatcccgagcgtggattcgagtcaagacatggagccctccgatgccgacaagcggcggggatcaatcccggatctcggattggatctcggattggattctccctcgcggacacgactacccatgtctcgcaaccgcgcagggactttgtcatggcagcaacgcccctcctcacgggacttcggcatgtcacccgcttcaacatccccaactcgctccccaactcgtgcaagccacctgagaaatttgtctacggcatcggatgagaatacactgtctcaactccaattcggattcccgcagcccgggaaggatgcccctgtgctccctccatcaccggaccgcggggctgaatcggtagcacacagcgagaaagaggaacagatggatagccaaacagacgtgattgtggagcatcaagagcccgaggtggttgaagacccaaatcccgaactagatcaacaggaagcagtagaagagacatcaccgtcgcccccgaggactggttctcgtgatagcaacatgagccatcgcttctctgtatcgtcggtttcagccactggactggggtcgccagtgcacctgtcagagactacgaagctcgagcctcgacagaatgattcctcgttggaggagtccatgtcgccgtctcctacccagcggcggatgtcaccagagcgaacacggtcgacctcacccaccaagggcctgggaggctttgttcagagtgctatgatgagaagatcagatagtgtgtcaaaaaggtggagtgcacaaactccacaggggcttgggcggtcaaattccattgtgtcaaaccgcagcagtgtggctggtccaagtttgagtgaaatgacccctccaactcttggacgaatcaaccgtgactctacaactctcctacaaagaccaggctccagccacagcgaggcagccaccgagacacccgaacgaccaaccacagcggataaagacactgtgaattttgacagcccaggaaaatcattccgacctggtcactctcgctctgctagctctgccaccgcagaaggcagtgaatctcaaagtccgtttgtctcgaaaacaatggaccccaggcgctggagccccaacaaggcttcttggttggagagtgccctcaaccgacccgagctaccacgacaaaccagcagacccccctcgcagcccaactgggccaaagaccgacagtcgaaaggtagcgtggatttgggacgagtcaacaatttcaaggaagtcacccctctcggtttgatgcgaacacctccgccaggaactcatacaaaactgcctgggctctctgttccatcgcttccaacaagccctatcaaagatggtgttccagagtctccaataggattccctctgaagaagattggtatccctggtccatcggttcctacgacccctatcaaggatcctgagtctccaataggatttcctctgaagaaagttggtgtctcaggctcatctcttcacaggaactccgtctcagatcctccctcggaattccctttcaagaagtccggtaccgctggagggtcagttagcggaagccctgaaggcaagctcaaagatgcagcacccgagtctcccttgggattccccttgaaaaagcccctcagtgcgggttcatcacttcacagaaactccgtctcagatcctccttcggaatttcctttcaagaaatccggcacccctggagggtcagtcagtggaagccccgaaggcaagctcagagatgcagtacccgagtctcccttgggattccctctcaagaagcccctcagtgcgggttcatcacttcataggaattccatctcagatcctccctcggaattcccactcaagaggcccagtgtctctggtcactcagtttctggaagcattgctaccgttcctgaatctccgtcggagttttcatccaagaaacacagtatctctggttcctcaatccctggaacccccgatggcaaatcgaaggagatagttccacaatctccgtcagttctcggtggccctgacgctggacaaacagaagaggaaaccccagcttctccatcgcctgtcgaggaacctctcaatgccctgtcaagcgatgcaccaacggaggaacccaagtctgcttctcccgctgaaactgagaatgagtcgcaagaactacctgcatctgaagagtccgagcctcaatctactcccactcgcagggaccctcccgactctttgagccccaaaccaaacttttccatctctacttcttcgcgggtgcccatttcacccatggtgaagccacagtctcccgtgctggacttccgagcaaacctgcggaaacgagaagtcgtcaaagacaacggagaggacaaagaaccagaatttaaaaatgtatttggacgcctcaaaaagactgaacctcgcagctacgttccccctgatgcgctcaagggcaatatcctactaggcaaagctgcgctgaataacaccggcggaccaaagaagaccgagcgagttgatgaatttaggaagagccttgtggtgcgcaaagatgaaatgaaagccggcgggggctccatcagacggaatacagctggagagcaggatgcgccaccaagacagactgagttcgtaccagaagcaattgctatgcgacaaaatatgacccgggcaaacagcatcaagcagccacttgtgggtgagccggtatcgcctactaaaagctttgcttctcgaatttcgcaggacagaccattgtcgtccccgaagtcatctatcaaaggcatcggttcatcgcgagcttctcaggaacaagaaccattgtcgccatatgctgccgatgatgagccgacatctcccgctaaaagctttgcttctcgtgcttcggacaaaccattgtcgtccccgaattcatctttcaagggaatagtttcatcgcgagcttctcgggaacaacaaccgttgtcgccattccctgctaatgatgagccgggctggcccttgaaagacaccagttcctcgcgtacatctcaacaatcacagccgttctcaccgttccctgccgatgatcccagcgatgagccaggggagacaatccccgcggcgagcgactacaagcaaacccccgaggtggtatcttcagtgaaacaggaggaaaccccaaaagccgttgcaccaattgagcctagcatagtgaagatgcaggaaccctcagtcaggacactccgcccagttcgtcaatggccaccggcacctgttgcagaggctactgcgactccaactctagcacctaaaagcaaattggcgggccgaatcaaccctgcgctagctggcctactttctcgtggcgcgcctgccggtgacggaccgaagaagcaactggcaacccctgtctcagcgccgagtaaccctgcctcgccatctgcgcctctcacgcacgtcacaaagggtcgtgccagaggcccgaagagacgacttccccagacaattgatgtctcgaccccgcccgctcggaatgctattaaggaggttggtgctatttcctatgaagccaccccgccagagactcctacaatccctgttgagtccttggacatcgattcggagtacctgtcgcagtctgatgaagacccagttcctgacatcaaaaccccccgtgcagacagcgcagtcaccgagcaatttccggaggtaaacactcctccccaggatacccttgaacgcgatacgcccacacccgaaagtaatttccagcgcgctctccagaccccttccctaacaacgaatttcgacatgtttccctccgccaatcttgaggcgacacccagggaacccgaaagccctggagaggtgagtccatctagcggaccacccgtcccgccgaagtttgattctcccgtctcccccttgcctgtaacgacaaagacacaatggggccagcaaaaccggtttacgtcctcatcaccgtacgctctcctaacaagccagaaagtgaaccaaatagaatcacctatgagtcaggagaagagcatccccgatgttaccgtcgagtcatcacgcagttccgtctcacggcccttgagccatccctccccgccagtacctcctaaagacgatgatgttatgctccataagccacccaatccgcgcagactttcaagaaagatgtccgctccatcactagtggcgcaagctagtgaggcacgtgaggtaattgcgggcttcttcaagacaatccctaacgctcgaaaccgcatggacattgatccccagctgatggtaatgcgtaagccggatgatgttaagatcaggaccgtgaagctacatatctgggagctcacaggtgatgggaggcgtcaggaacttccttcccacctggagtacattctataccaaggcagcatgtatctctgcgtgcatacattcgagaccgaacgaggcaacgtttcggaagtatacctttggcgtggagacgatgtccccgacgcctcggtggataatgaacagccgtttgcacgcaaagtcgctcgtgaaaatagctccaagttgcaaatcattcgacaaggcaatgagcccaggcggttcatccaagcgcttggtggcattatgatcacgcgtcggggatccagctcccgccacaattcatcggctctttacatgctttgtggccggaaacacttgggcgagatgaccttcgatgaagtggattactcgctgcgcaatctctgctctggtttcccttacgttgtctctgctccgtttggcaagctctacctatggaagggcaaaggtagtggccctgaagagaccggtgcagcccgacttatcggcatggacctaggtctgaccggagagtttgaagaagtcaccgagggtgaagaacccgacgatttcttcgatgtcttcgcagggcccagggaggccgcaccgcacatgtgccaggattactggaagctcaagccgaagtacaaccacttcggcatgcgtctcctccgcgtcgaccacgaagtgaacccgccaactcgtttctggaatatccgccgtccgggcgcaggtgcaccagtggttaatgccaacgattgcgttcaagaaatagagccattctgctaccgagacattgtcgagaaagatgtttacgttctggacaccttctttgagatctacgtgtaagtaccaccgtacgacaatgccctccactcgactgatgctaattccctcacagtattgttggcgagcaagcctcacagaagtctgccgatttcgcctcggcggtggtcttcgcgcatgaatatggtattcttgccacatccctccaggaccgaccattcatccccaagagttacgtggccctcggcggcatccccgaccgctgccaaagcgcattccgcaaatggaacccacgtgcccagcatgcgcctttcgtgttctctctggatgttgttatcgaggcgattcgatcaccagaggagaattgagtgatatcttgcgttttttatctgatttttgggggggcttctgctttgaatttgtgcatatttcggtttgtacaggctttacagagcatttcggagtcctgtgtacttgtgccatatttgcgccatagagggaactggagcatctggggactgttgggatgtagatagggggatttcgcatttgatggtgtatttaggcatttttagcaattcaagtttcataccgaggctgcctattacctaggcttttcttatcttttgagattacatatacaacacagaaattaaaacataaacatctgaatcctcgggcaatttaggatattcaagataatccatggatgcaatggttatggacgggaacggaaaaccgatcggagataaaaaaaaaatcatccgatctggaatgtcgccatcctcgatctttcgatcgttcgatcggacttgtgaataatttctccattcttacatgctactcttcctcatggcaatgtaaatattcgagtcatggacccctccatccttcgcgagctctcgaagctcgaccccgcgctacccttccgcgcatcgaccgatcatttgcatcacacatgggccaagacattcttttcgcgcccggagttgtacattcgtccacaaaccattccagagatccaacagctagtgactctcgcccgtcgctgtcgtcgccgcatcgtaacagtcggcagcggccactcgccctccgatctgacctgcacctcgtcctggctcgtcaacctcgacgacttcaatcgcatcctccacgttgacccgtcaaccggctcggtaaccgtcgaagcggggatacgattgcacgcgctgggaagagaactggacaaacatggcttgacactcgagaacctcggcagcatcgacagccagtccatagcaggcgtcatcgccactggcacccacggcagctcccttcgccacggcctggtgtcagaatgcatcgactcgctcggcctggtactcgccaatggccagcacgtccgctgcagcccgacaaacaacccagacctgtttcgcgcggggctggtatcgctcggggcgcttgggatcgtcgtcgaggtcaccttcaaggcggcgcccacgttcaagatcgcttggcgccaggagcggtattcgctcgctcgcgtgatggatgaatggtcgatgggtctgtggacatcgcgtgagtttgtgcgcgtgtggtggatgccttatgagaaaggcgctgttgtctggcgtgctgataaaaccgacctcccgctgcgcgctccgccgaaaaccttctacggcgactcgatcggctaccacatctaccataacctcctcgcgctgtccttgtacgtcccgcgcatcctgccgtgggtcgaatggtttgtctttggtatgcagtacggcttccgggccgggtcggtcgtcaccgaggccgttgagcccgcgcgcgagggattgttgatgaactgtctgtattcgcagtttgttaacgaatgggctctcccgctggaaaagggtcccgaggccatcggtaggctttccgcctggctgcacggcgacatggagaccgcgcgcatccccttctcatccaagggactgtacgtgcactgtccggtcgaagtgcgagtctcggacacctcgctgaacaccaagccccgcccattcctggacccgacgtgtcacgacggcccgacgctctacctcaacgcaacgctttatcgtccctacctccgcgacccgccgtgtaaagaacgctactacgaagccttcgaatggctgatgcgagagatgggtgggaagccacactgggcgaagaacttccacacaaactcacacgagctgggcgcctcgtacgggtcagacatggagtcgtggattaaagtgcgttcggaggtcgatgctgacgggatgttcgtgggcgaatggcatcggcgtcacctgcccctggaactcgggcaggcaagcgcagcacctgcaggcgagcggctgcccctcctcgagcgcgagcacgaacgtcgcagggtagacattaatggcgtcggcgatggcgtcgaatgggtaggggatcgccgatggcaggctcaggctcagcgacaaccttttgatgcgctggatatggagaagagcctgtatccattaccgccagatcactctcctagtccgcctgggacggcgagcagcgaggagagctttgatttgcttgccaggggtgaagcgagcatattgctccccgacggaccgggggtgtgagaggagagaaatcaggctccggtcgaaagcaaacaatctcttgttgtcgggtgcgcgagtcctgattattccgttgcttttgcatctgctgatctatcggtgattgttctgactggtccattcccgggctgtgttgtggcttattggggtgcttattggctctacgggctaatttggtgattatccccgtcactttcgtttttttttcctcttttttctttttcccctccccctttgttcgaagcaatttggggatgataaattacaattggttggcaaatctgacatccgaggatgttcaggcttcgaatcctccaactgtttccccaaaaatgagggctttttttagatctccttcctatatggaacattacatggaacatatagagggatattacatattgcatactgcatattcccctgcttttacccttgttttgcttttttcaccccccattttccatttgccaaggctaaaccagagaaatcgtatggcctcgtggtctctaacttgaaatttgaatctgtcggtgaacgagtctgcatgtttgatgcaggtgcccataagctcttcgatagggcgaggtttgtctgcttttttgcttttgaaaatatgcatacaacatacagcagtcaatagttgttccattcttgtacacactgtggccaatttacgcagaatagattatcttgtttctatggatcggggaggaaagaatcacactgtgctgtgtgtgtccgtgtcttgtccttgtccctttcccttgtcccctgttccctgtcttgtcacagctgagagaccttgagatagtccatgtatagagtacccaacaaacctttcttacacattgcacaggtctatacaggtccattgatttcattgcactccatggtctagacaaccggcaaaccggggattcaggattgatatttatctgcttgatatgagggatgagggaaaggaagagagagtacagatgtactttgtagatcagtgataccctgtatggtattgcagctcgagctgagcactgtgctgcctggtatgtatacttagtatacctcacacattacactgccaccgtacaaacgagagatcaatgcaaagatctagcctagacaactgttcagattagggctggatctgatcattgcacacttgattctgtgcgagaatgcaggcagtaccagggtaatattgtacgaagatagaggcatcaagacagaacagccctaatcggatacataatcaggggaatatcaccccgctttgtatcagaaatactcttccttgtccatcagcctctttaactctttttctttcggaggctgagagcctaacagttgattgtcgctatcatgttcgcatattggcatattctggcatatcatgttgtaccacgtttcggtgcagctggcaaggatgtctatatgtccgatgctttttttcaccgacttctttttatctcgcattgacccctccatagctgcagattgactaggtaattgattggatctttcttctcatcgcaaatgactcggagttggcctttctcattctccaggcacgtgtgttggggatctctctctgacgtgcagtgtcagccttcgaggggaaaatatcgtgtgacaaggaacgttacctctctctgtcgtttcctgcccaatgactgggatcaaatctcacggactcacggctgggactgtgtcattgtactggtctctgggtatcctaagcagtcgcctaaatgtctacggtctacctgcttgccctgggattcaaaccacatgtcaccaccctcgtcaccctcgaacgctttgaacagtctctccacgtcacggcttagctgctgatgcgggggacgacgtctctgcacctttgataatcatgatatcaacctttggcgctggcggctgaatgccggtttcattatcatccaccccacctgctcgattcttttctttttctctgtttttcttttttatttgggtcaaagctctctctccctctcttctcaatcttgagatcttgctctttcttcttctttctttctccacccttcctcttgcattgcaatatctacctcccttgcttggtttccggtggagtttccaatatgatacaatccatgtcgtggcagccaaagcttcgccccaagggtttcccgcatagcattgatggctttgctgcggtggcttcgttgtcggagctggagcatcgggcccggactgaggacaagcgggaccaacgcgtcttccgggtcaagcgtaagcatgttttgaaagcctgtgatcgctgtcgcgtgaagaagaccaaggtatgtcaatacaccaggagaccttgatttgcctaatcttgttagtgtgatgggaagcagccttgcaatcgctgctcggtatacaaccacccttgtctattccgcgaaagaaaggccactcagaccaaagtatactctcgagggtgagtacatgcagagaatctcaagccagacatttcctcaagctcatagacaaaccatgcacagattcgtcgaaatgctcgaatcccaccattccctagtggtaaaggcccttcagaagctctataaattctgcgtcaacaacgaaggcttcccaggcgatcccctcgccgaagccccagacggacaccccctaacacatgcaatcctcgaccgtctggggctaatcaaacaagccgaagaaaacgccgacgagccagacgaggactcagaggatctgcgctacctacgactgctatcaacatccaccgaatgcagcgtcacagcagagccctcgccagagccagcaacacccccagagccctcacccatctctcgccctaccgcaattcccacaccagtctccgtccctaaccgcacccccaccaccacaagctggcagtgggatccccagcccgttcaccagacgagctacagctacccagacgcagggtaccacgacttgatggtgatgcagcaacggtcgtccatgagtgcaccggacatgggcgctgatattgcgcatattggtctgccctctgggccttcaggtctaccacatattccgcaacatgcgcacctcgagccgccgttcccgtatgtcttggatggatgctgcgatcccggcaccccccaacatgatgtcaagcccgtgctgtcgaggctaccgtccggtctcatggctgagtctcattcgcatccgcaccatcttgggaatctctcggtggagatgatgggtgactacaatttccagcatgacccggcgtattatcctgggtttacacccggctggaattttccttctggttaaatctgttttggtatttgctggactgtttctcttgtcttttggagatacatggtctttgtttatgatttgggttttttggtacaagctgttgagcagctagtttcatttcacttcttatctatatttcacattctcttttctatttctcgtcattatgatttgcattcttcttgagctcttttctttctctttttctcactctatacccccctcatctgaatttgaacaccaccggagcatggagcacgatatgtccggcacattgagccctaatccttttggccagtcctttttttccttctcgggctcagccaggtctttctttggatcgtcattattgatcttgatttggatttcctttgattctggtatctagtttgaaagagtatcaccctatcaatttaggtcctatatgcctttggtcttttcattttcctcttaccgctagcgctcgcgttagtccttgggtagaccctgtctttgtatagaatgggttaggggtggttacttacaatgagatatggattagcatagtatcatacctttgacagatagacattctccgacttggggttatacttcccagccacggccatattcaaacaataccaacgacgacgcccacaaatcctgcacataacacatgatacatacatcccacccaaccagtccaacatccccaacaaaagataacacaagaatagaaaatcggctcacaccagatctagatctcgcaccaggtcatatggtcgtacaatgcacgacctgacacagattcatctagcatcaacttggaaaagaaagacagccgcagagatctgaaaatagttaggagcggcagatcagatcgtatcggatcgtattcgcggcaagtgcgtctgtcgtctttccttccctgtttgggctggaggactggggagggagggctaggactaggctgcgtgcgggaaggttgtttgtgggacttgagaacatgctttgtcgggggttgctgcttgctggggttgtttgtgtaccctggttttgtacggagtacattggtggatatactaagatcgatgtagatgtaggtgatcttccgatatatatatctaagaaagggagatgcagtgtgatataggacagagaatgacattagacattgcaatataaaatatatatcgcatcatgctctcgtcctatcatgcctggtggaaatatgttattttcttgtaatccatttggttggttttgcctatacctcctccctcgcactctcccggtgtttgtttaatggagacctattcactcttgccacttccacatgtgttttgtaagacacactgcaactacggcgcttccggggatgtgcccgaaattcaacatctccggccaagggtttgccgactcgatttgtaggaaatcgaaatcgccgaagacttgccgacgcctcgctcttaacataatcacgagataaatggcctgtaaatctccagatcgccatcgtggttctatctctttgaacccatgtccccttccgcttccgggatctttcaaccagtatgaatgtgattactacctctgcagtaccctttgaagtaccctttgctaatcctggagccgtatatgcatatatagacaggatagtatcggccggggtccaatcggctgccgctctacttagtgaggcccaggaggacttagtgaccagattagggatgtgggtcagtaggtaatggatcagacaccaatcaggaccgctctgtgttgcttagtaataatttagtatttatttttcagagggcgatcagtcacgtggtcctggtcaaggtaccatatataagccccagcagcagcttggaggtttacacctcctatgaagtccacactcttctttcaacagtatccttcacactgtctacaaaatacaagtgaaatacttcttggatataggtgcgaaacacattcaaatgaacgactcggaaatatccagttaacacaccaatacttgatccagcacatcaagcgtgttgcaatatgatatctagcaatatgaaaaccgaagacagcggcagctctgtccctccaactcctcctcctacccctgctcccagacaccaggctctatcatggagaggttttgcagagacatttgtgattaactttgtgacttccatggctgccaccaataccagaaacgtcgtcttcaagtccgacaatccttaccttctgtgtgggatttatgcatgttttcttacgttgtttacttttctgtatcggaaattccaggctctttacttgcggatggataagtgaacctgggatcaaggatgagagcttactcatagcataagctagctacgtattatttcgactgcctggctccatgttgcatcaggattggcctctaatcgactcggaatatgatcggaggatgagctggctggatcaggagcaggatacgcgagcaaaagcccgtaaagcgacatgtcgacccacagaaaggatcgggatcagagtcctaagtggggagggaagagggggatcttcattcttccagaaaacttgtcagtatccctgtctaatttgaggcgaagtgataaaagccgtaactagttagccattcaagacacatacaacatagacgggtggatcttggtatctaatagccatcgacttgagggttggttcaaggcatgagctaggtacaacgcgaattacttagcaatcccacacccatccatcgctaactaagctttcttgccaatccgattcaaccgaagcagcctaggcttcctcggccttatctgacgtgacgtgaaattggcgacagatctacaagatactctgaatcgtttgttcgcacgtctttaacagccaatcgtctttggtatcggcttttcccaccatattcactcaagtgatgtggtttttttacatccattcctcggtgatgtagaccaatggcaaaagcaccgcatgcgaagggtagttggggtcaggtatttctctctcttcttcttcttcctcgactggacagcttcttgaagatggggttctttggaccggatgaagagtttatcgaggttatgctttaaagttgttgtgcctaatgacattcggaatttcctataggattagaatccagacgaacgcttttaatttgacatggtaggttttatcggagatagacatggactagtcggccagtgtattttcaaaaaaaaattaatacatttattcaatccagactctattttaaatctgaaagtagccctgttgaatcactgtaccgcgatgatcaggaggacccggactgacaccaaccattacccagaggagtaacgagttcgtagacagcgaggttgaatgacatcgccacacccaagtccctccataattacccgatgaataagaaaattcgaattcgacaccagaaaacgccttggtggcaacaggcctaagcccagggctagggcagcgcaacgccgagggccagggttcagatcaaagaccagtgttacacatacacatcacacaagctacgctgtgagtacaatcgatcaatcaatgcatgagaaaggaatcaatcctcgtcttccgtctctgtgttggtgtcgctggtatcgcctgcgtcgccgtcggtatcactctcgctggagtcgtcggaatctttggtcttcttcttaggcgcttggccggtcttgatcgcttgcatttggccggcgatggagtctagggagggttagtataagcgaaacaggtagtttagtggtttgggaagacttaccctcgtctggctcgctaatgtcgtcttcctcttgcacggcggctgccttggcaggatcgtcaatgtgcaggatgatttgagccgtgttgtcaagacccagatagctgtcacagatcatgtggaggaggaaggagaagtcgccgacctgtgggggagcctggaactgcatcttgagagtctggacgttgaaggtgggcttgccggcctcgtcgaagatcggcttgtcgaatgtcgtaaatgtgaacggcggtacggccatcttgccctgcttgccgtctgctaggaagatgttccagcgaggggagtgatcgcgcgctaggtacggtgcgttggccagaggcggctggatgctttcaatctttgcctcaaccttcttaccgtcctccatcttagtggcgctgttcttggctggcttgcgacccatcagggcttccaggtcgtcctcgtcggggtcaatgtcctctaggtcgagcgggttcactggcggcacggatgtgctgcctggcgggatgaagcgggctttgactaccagctgtaccagactgctgggtgtgatcaccttttctcccataaccttaaagaagatccgctcgggttgaagcaagggaagttgcttggcaactgatacggcgtcggtgtattgcttatcggatagaagaccagcgccgacagtaagactgcgtcgctgagcctctggtagttccatgtacctttggacggtgagatgttccttggcgtcttcgccctctacggacttgacaatggcctcggtgaagttgggaagttgcagcagtggtgatgagcccggggacacagcctggatgaggttctgagacgttttgaaggcaccgacgatcggtccgagattaccaaatgcgagtgaaatagcagtgaaagcttcagtgagagcaagggcgacaggagccgcttcatacttttctgcaggccagttagtggtatttcagaatatcatcggggcttttcttaccagcatccagagaagcatcaccaagatcaattcgcccaagataagcccataacaaagccaaggccttccgacgagaggagctatccaattgcttcagggtatcacggtccttgggcgtaaggaacgaattatcatctgccagcacccgcttctcgagcttgttcaggccagactcggcccgggcacccttgagcatatcgttgaattcctcgccagacgacaaagcgctaataatcccaccttcggtaatatcgtccttgtactcacggaaaatgtttccggcactggcgacaagaacgcgctcctttgtgtagcgctgagatccataccaccacttgccgacgatatatggtagaagaacacccaaaagggcaccatagaccatcagaacatatttgccattgccatccatgataatgaacttgggaagggcaataccgatactaaagctctgctttccgtcggggtggccaaattggaggtagttgtttcgcacctcctcatcggtgagagctttatatgccttggtgagctccacgaaacgctcgttgagcatctcgatggtctcattcttagaggggtcaggacgaattttatcggggtgaaagatcaaagacatgcgcttgtaatgtctggagatagctttttcatcggcgttctgtttccaagaatttagtcagtgaaatcccctggacgtaggcacgcgccgagctgaataactcaccctcgagacacccaaaatatcataagggtcgtatgccttcaccactgtcctagcggtgacgacaattaagtagaccatccatgccattacggcatagccgacgacgacggtaataatgcgcttgattcggcgctcttttcggagacgcttgcgcttctgcgcgtcaatgaggtccgcatctttaggtttgaaatcggatttgatgcggggagcggtattctcaagctctgtagatcagatatagcggttagccgggaaccacacatatatagtcccaagtctcacctttgctgggtcgtaggaggttataggtgagagggagagtgaccaggccggtcaaggtgaggatgaagaaggggaagaattgtccctgaaggttcaagttagcgttaccacgtctttatcggatcaaatcccgtccttacctgctcatcataggtgtagtctgacgacatcctgcggcgacttttagggtatagacagcggaggccgctggccgcggaatttaaagattgtgttgcgcagggctgttgatagtagccactttggatggtcaagagaaggcttttgggctaggggaatgacacagtagcctacttagagcccaaaatgctggctcacaagaaacaaaggagtgatgcaggttgggtctatcgcacttcctgatctggtgatgaccgtgtcctctagcagggtccactcaccgcctgccttaaatgggagtgaatacgtggcagttttttgagcggtgcaggcggtgaagacgacatctgatgttctacatcggttgcataactaccgtttgttgttctatcttatgcttcatggctttctacggctttctacggcttggaatgtcaaatatttgtcaaatatgttcatgatttttggtaaatgagctcaaggctgcatatatactaattaaatactctaatagagctgatcgatatccaatcgatccatgcagcagccttcaccacttcctttcagttaggagtcttgacagaacagatccatcgcacacaattctcccctcgtaataaagataaccaagacttctccagtccgcccagaaaaggaattcaagcgtcaacaactcgaggtcggacgcaaactcaaccaatccagacaaagcatcggaagcatcagccagaaaatgcctgattcattttctcatgtgtgtgatacaatcagtggaccatgatcgacacggccgggccaaaagggaccaatccgatacccgaggtatcttcattgctacaagtcggggacccgggaaacccgtgtgatctggcgttctcgccgttatagtgtggtgtgggcgcatttgcagtggccgaccgcagacgcagggcgtgcgcgttgtcggttcattttcgatggcagtttttgttttgtttttgtcgaatgcggattcataggcgtcgcatattcgtaaaatcgttttggtgttttgttcttttttgttgactgaaaaaaaaaagttggggaaacaatccgtccgggaagtctccagacagagagttcagacattcaatctccaagggcacggccactcgttctggaagaaatgtcaggattgttttttcgattgtgtcagaaccgactggtactcacgagttgatgtagtcgagtccaccgaagtactcaagcatccggtaacagaggctcacatcgtcgcccggctcgccaccgaacaaacgacactgtgcttcttccagcccagctgattccagccgcgaggggcgctcacgggtctgccacgctgtatacccatattgccatggtggagcgagggtgggagatccccgtggaatgcatgtgtccggggagttgtcggcagacacaagcgcgcaaaagctgttctggggtgtccgaatggttgatttgacggacaaggtcggatgttgagcgagcagggtattaggtatgcggttggaacgacgagtgcggcgtctattatgcctctggcccattctcggcagttgaagaatcgaggatcaaagaaatggagaaagcacttttaacaccgaggggagcgaccatcacctcctggaaaggatgagatgaggtactgagagaaaaacggcatgcgagattgcaggggtgactctttatagaccgaactcgccaagtgagtcacttaaaggagaaaaatgggcgacccgcttttctgggtgggacccgagggaggagatcaccttgtgcgatcaccttatggctttaagaatggcgccagctcccacaaggtcctgcgctacttccaattggtccaagggcgagttttctatcgcgtcattcgaggacctccagtaatgattagaattaacggcgtttataaaatgaggtgattcgccttagagatgagcctagagatgagcctagagatgaacctagagatgagcctacaatgacattgagtcatccatgaaattgcgaaaaatgaaacacaaaaaatgaaacacaaaatgacgccgtcctctggctgtggcatgaggtgattgggactgatctaggccgatgccggattgcctaaagagtgccgtgcggaccgagcgatgatcacatcagacgatagccagctttcccggctttaccctcatctaccctgacgtaccctaaacaacatggagatgcacaagtacccaatttgcctaaacagcccggagactggcgaggtctccgctgcgattaatacctagcaagggatatttgaatttttacaccttgcgtcgaacaaacgcacgtgtgcaacgtgttcaacgttcaacgtggagaaccttggagattctcagatgccttccaagttccaagccacaaggcaatagagaacggagtcatatttgatttttcttgggagatctcggcaagctaaacgaaaccttggggtggtgactattgactcagatttaaaaatggagtgcctgatctgtgaggataaatatagcccggaagaggaaatttcttcttttgacgcttctagtccaaacagaacaaacagacaaacagacaaacaatgcaaacacccagattctagacctccttactccctacagcagatcgctgtgccaacagtgtttaccgatcactatattccggctcaatgcaatgcgcggtactgtaaatccttcctcgtctgcttcgaagcgtccacttcaatcatccacttcagagctatcgacctacgtaaaaaaaaaaaaaaatgagacgttcattcagtcgttgaccgctgtcttcaagttgtggagtgtactccgtagttagttaccccctactgacatttccaaactaacgattgcgtcttagggatgatcctattcaccatgatctccgtctaggattctccaagctcgggcatgtcatgcaaaaggcagttacaacttaaacttattctacgactcccttgtcaaagtgtgtattgtaggacggttcctgcaccggatatcccgcacctacgcctcatgcatctcggccactacttttcctgagtttacccggtttacccttagtacggtcgatcaaagaccgctgtggagtttactccatcgctccgctggatgtagaatggaagagaataaaaaagaacaaaaaaagaagctgtttcacgtattcgacggatgctgaagttctttatctccacactggggcttcgttttaatggggaactgcccaaagagagacaaaggggctggttgcgattccacacgaaaaggaggttgctcaagctggtgtctgtaggttgaagcagaaggactacgatactacggagtagactgtaagctcttgaggaacaagcgctggaagtcttgtcgatgtattctgcgttcaggggtaagaatcttagattttttcactagcgtggccgtgagggatcgaccggggaacttgaacaatagttatccattgctgccttattctggaaagcagtctttgtctattcatgtacgatgcgaggctctacccaaaacaaagacttgaaaaagcgtaatatttgagatcaaagggatcatctatgttggtcgaggtcgagaaatcggcaatatcacgtatcggcaattccatagctatcattgaccaggtctcacccagtcataactagagtcagatacaagagcaatgcattaaatgtataacggcgttaacaataatcaaagaccgacagatgtaatgaataagaagaagacggattgaaccaggccgtgtacacaaagcccgaaaagcgaaggagaagaaggtaaacataaagaaaagcgaagtgaagggtaagagggcaaaaaagaagaaacacaacccgcgtgtgtactgtacagggtcccagaatccggaccatgcctggccaccaaaagccatcattcctgtccaagacgttatgaataggatccaactctagaccaaccattcccctaggaagggcagcttgcgcatccccgaaatcatagaccgtagctccaaagacatgcatgacaagtaggaaggaatcggaaattccgactagctaccgtgtagctaccgtgtagcttcggccttacttcttgcggttagctcggcgggcagcgagatcgccctcagcgagccacttgctggcgttcaccatctggacgacgttgacgaactgcttgaacgccatgatggggaacgagatgccggtgatgatccacggccaggtgctctcgagcttgttcgcacgcgccatctcgagggctccggcgctccaggggctagcgaagaggctagctggttcggggtgcgcggggcttccaggctgggcggaggacagctgggaatcggagatgggctgcaggagcgaaggggagagggttggcgaggagaaggacaggaggtacaggccgatgaagaaggcttcattggcggtacagcagatgaacagaacgagctaacaaaacattgcgaataagcttggggacggaatatcagttcactgcggggccttaccttgctggtgtagtactggtacataatccagctacggctaggatcgaccttcttgtggctctggctagctccgcccatgcttagagtagcgtacatgtgcatgtagtggctagccatgtccaagctgatcagaccctggaaaatgatggcccatcggggccaggcggagctcaggaagactaggagacacgcagtggtgcagcggtcggtcaccatgtccagcaccgcaccgaaagtggtggattggttgaagtatcgtgctgcataaccgtccaggccgtccagcagacaggacaccgtgtagaggaaggagcaggtccgggggtggaggggcatgtagtatagcgaggcgaaggtcaaaaagacccgggaatatcctgggaacgtgttaaaccagatgccaacgtcaggcttaaagccacatcagcggggcattctaccgataagattcggagtgaagaggaagatattttccttgcgttccttggtttcttcccgtgcggatgcgccctctgaaggtgacacggagctattgcctgcatcttcgctctcctcggcgagggaggccttttgtcgtcgtgttgcgctcattgtgatgtgaaagggatgtgactggcgagcggtttctcgtataggtcgggggacgtatggataccggacagttggtctaagcgctgtcagcgtcgggtaatcaagaagcaaagacagaaacgcaccgagataagaatacagcgaattccgtcaggataaggataggaggtggtccaggtgggaaggagaatttcaacgataagggaagataagcgcgctttgttaacacgcactcgaaacttccaagggtcgatgaaagagggaaaagatgaaaaggtaggggatgaaagaggaagctggaaagatggaggaaaggaaattgtggaatgtctgcgggttactcggaaccgtggacttgagctttccccacgcggtccacttggaggtgatcgtgatcttgagagataaaaaccggactggacttgaaacatcccatatgtgggtgcaacatgtcaagtctcaaaaactgaagatgtttgtgatacttgatatagacccttggagacagcctgtttcatatatttaggtgtttcagatattgtgcgacctattataatcttgtaaaacatgcttttatagacatcatttgattatatatgaccagcctacaggcctagaagatatgtacagaacagaacccaaaatatacaagaaactcattcacgtccgtgacctgcgcggatcagtggcatcctgttcgcgccactcgcgagactccttagtacccatgctgccaacgccgccctcgagacgacgctcccagccaccaaggcgaacaacaagacaagtagcattgtcaccttccttggagacctcggtcgaaaaattgaccacatcgcgcgcgccctgctccggcgtgttggattccttgacgatatcaacgatctcctggtcaagcagtgtcccgctgatgccatcggataccaaaaccaagaacgagaactcggccgggccaagctctatgcgcgtgagttcaggctcggcagagactccgatgcgcttggagtggacatcgccgaaagcgcgcgtgttggctagcccgctcatgcgttcttcgccgaaagagtccgttacaaagcttgtggcataccgtctgagtcgggttgcctcgactggggaggaggggtggtggtttgatgtaacggggatggctataccggtttctgttgagcagaggagtatacgggtgtcgccaacatgagcaactagaaggcttgatggggcgatggggtgccagaacggggttggggtcggggtcgagatcatggcgatgcttccggtgctgccacccttgaaccgagcgcttccgccgatctgcggagatcgggtcatgctgggcctgtggaagatctcatcttcgttcagaggtcgctcggctcgaacgggatcgtcttctcgcttagctgcttgagcgttgacaaagtctagatccgctcgcaggaaggcgtactccacaacttcctcgatggagatgtggttcttaataatcgggtcgtcggactcggtgccattgtaggcgaaatgcggcggctggaacctcttgaagtagccaccaactacccgtctccaggtctgcacaaggtgtttctctagggctccgattcggcgacggtcaccctcttgcatcacaggtagttcgctagtggtgggtggcacttcggcaccaggtcgtagactggaccgaaggtcgatatcaaatgccgcgttctggatatactcgtgaaggtaatccctcaagaacgaactgcattcggatccgccatggccatcaaagataccgaagtagaagacttgtggatctccgctagcggtttccgcaccgcgcgactcccggggttcggccagaggatcatttttgttaggtcgcctaatcgatagcgaagttggaggtcgcttcgcaaaggcggggatgtcaatgactcccgcttggtacgtgtcttcattcgaagggcgggttccgcgggaggtgacggcgccgaaatggtgcttcgcgttgcggagtggaatgcggacgactgttgtctcccggtctattaaagcttggaaggcagctggcgatcgtggtgtgtctccggtgtgaggtatagaggcggagcgaggaagtttgtggaatggtgaggccggaccacgggggtccggatgaagcgaagacgacggcagatgggtgacaaagtaatcacgaaactgtggttgtcgtctaactgccgactgaccaggcggcacagactcggtactgtagcatcgcgctcgacgaaggagagcgaagcctgggttgtgttagctaggtgcttccaagatctaaggatcctcggagttaagcagtgtagctctggtcgcacatactgtaacagtcggccgaggtccagacccggcctgttactcgcctcgctgaaaggagaatcattggcccatcgaagtataaaaaatagcagtgaggaaaagagggttgaaaaggactggtgcgtggggagaacacatatggcccgagcgtcggcagataagaaggattcggaccggcacattctttccgtgggattagcttcattgctccactcgctatatatacatcatttacctagaagagagcatatacaatccaccgacctaatacaaggtgtttacacaggggataatgggccactaatcaagccaatacatgaatcctacaaagaccttctaaaatgcgaaagagttgcatgaacacatgaagtaccaagaagtggatatcgttcttcatgggctccacttatactacgtggactacaagcagggcagagtattgaatatttcacgcaaatcgatttgaaaactgaaaaacagggccaccaggcgctaatacacagctaaaaccgaccatgtcggtatgtagcaggtcatccaagatccacggaagtggatcagaaagaagcacgggtggccaaacaagaaaaaacgaaaaacaacgctgagagagtggcacctaccgggtagcagggccgtccattaagtccacggaagacagggggatctgccttcagaaattccgggttagatttcgagaaaaaaaacacgggatgtactcgggagagttttagatggccctagttcgagagaaaagactgctgtaaactgcatccacgacgggttgggcggtgcacatctttccaccgaagtatcgaccattgaggcccttgatggcgttctcgccaccttggacgcggtcgaacttcagatagatatctccgacggaattgggatctagtgaaatgtgaacaacgtggccgtatttcttctcacactccgttcggacgtcctcttcgaggtccttgacccaggttggactgtgctctctgtaaagaagtcagcgttcattctctcatgatggcgtcaaggaaacttacagcgcggggtcaaacatgttgcgcagcaaaacacagcgactagccatgttgacattgatgggaagcggcttagtttcggtcttgggtcggaggaatttctgacggtcgtcaacagaagactggggttcgtcggttcgtgcaagctttctcatcaaagcatccctagagtagttgttgaagtttacgccagcaacatctgtgtcgtcaagtgcactagcaccggcacccttttcagtttctctgccgccagcacggtcaaagttgttggagcctccggcttgaacgccacgacctccctggccggagaacgaagaaccctggaagtttgtagaagcacctgaggcgcgattggcgtgcgagtcgggggtgaacttatcattgccgagaccaacccgaatatttcgtccagcaaggtcaaagccgttcatcttttccaaagcgttccgagcttgatcggggtgggcaaatctggtcaagtcagttaatggaagtgtcaataacatggacggacaacgtactgaacgaatgcatatcccttgcttctaccactctcgtccgtttgcagctgaacgaactcgaggtcgccaaatggttcgaagacattggtgatatccttctcggtaatgctgaagtgaacattaccgacataaagtctgtggaagggtgcggtgtggtggtttcctgctggagcctccgggtttcgggctgcctggcggttcttttccgcttcagtcagttgggcaatgacgggaattcctgcgagcatctggccggtgagtcggatggcggcggagacagactcctcgtttttgaactcgacataaccgacactatacaaaatatgagaaagtgctttaaccaagtaatcatgtgaatacataccctttggagcgaccgttaacacgatcccggacgatttgagcatccttaacggggccggccttttcaaagaaggcaatcaaatccttgattctcaggcgggcagcaagttgctgcacaaagacagtgcgactgtcacgttcatcctcgttcagttctggagacttgcggctggcggcggatccacggcgaacatcagcatcacggcgggggcgtcgttcttcctcacgctggcggcgattgggccggtagtggcgatcgtcatagggagaacgggagcgggaacgaacgcgacctccaccacggtagaagtcaccgttggagcggtagccgtcacggtcacggcgagaacggcgtctctcagattcgcgactcttgctcctctttcggcttctaaggcttccattagcactaacagtgtcgctcttggcgacttcgtctccctgaaggtcacggtcagggcggcggtcacggctgtggtcgcggcgacgacgtctgtcgcgggaacgatcacggcgctcggtggggtccgcgcgggaatccgaagtggcgggggcctcgacgggggcctcgatgggggcggccgcagtagactcaaggagagcctctacgtcaagtccagacatcttgggaggtagcctgttgttgatcagggtagaaatgatcggggtggggatatcactttgtaggggtcagatcgcgtacggggacgcagagttggtattcgaaccctgattatgggatcagagtgaggtctccttggggtttgaccctttttacacgctttgggactcttgttcttgatgaaagtcacgccagaaacgcgacaaaagatgatgggggcttgaagcactgggggtgatggtatagtataaataaatttggttggccgggacctcgggaggcacaaagagggtcgaggcggtgaaaagaagagaagagtcacgtgggatctgagatttctcgccgccttatatatcaaggcggtctggtttctgcctgaggcataagattacgcgttgaacttggaaccttaaaaatgtcagtatacttctatggatacaagcaatacgtttgacagcgcggaagaatctgccttttatttcctttgccccttgatatctgtcggatccacgctctaaagtgtcacttttctttcatctacatctctatgattgtgaaaattgcccacttgtttgcctaagtaggcaaaagttcacccaagtaactattacaaacgacttctgacacgtagtagatactatatagatatagatattattttcttgcattatgattaacggtcatatacactgataagtgatgcttgttttaaaaaaaaggaatcaactccgcttgcaactagcatcatcacaagatatgacatgacaaagtctccccctgagaccaaccagaaactccacactagccaatatacttgaggagtaccgaagagtagtgactcgatcgtactcggcgttaaatcgtgacttgaggactagtgacagccccatattaatgctgtgatttcttgggctcactgagccttgacgcccttcggggcgggagacaccaactcggtgccaaagactcgatcccagaatcggctggtcacgccaaagccattctcgtaatcggcaaaatggtgctgaaggtggtacttcttgagctccttgtagtatgaaggaagactatatggatgttagcatggtttcattgtatcaaagatggagttcaacttacctgcggtggtgcaggaaataatgggtgagatcatagcaaatatacccgaagatgccgccggagaataccgacgtagccgcataccagttgtaatagaatactgcgtgtgccagcttccagaaaggagcggctagtaccacgaatagtgtcggtggcataacgagacgatacttgtccatcgggagatagtggtggataccgtggagcaggaagtgcagggtaataccgacacggttatccggaagatagtggtcaatgtggaagaggaatcggtgcaacagatactcgatcagagtccagaggcacacgccaacggtgaagtaggaggcagcaacgacggagttacccagcccgatagcccccactgttattccgtaggcaacacatggcaaccaaatagttggcacgatgtaccatgcggttttgctgagaggctccaggaagttgccgaacaaaggagcggactcccctccccggtagtgacgaggccgatgaatctgctccaagtagaactccttggagaagttgctgtaccacagctgcagcagaagcggcttgtttaagtccaggaacttatgggttttgtagtcctggctatagtcggtgtctatcgacaggtcctcctcccgagacattccagtagttgtgtaaatgggtccggactcggtttcggtcaccgtttcgatgacagtggtcgtggttgtcgtggttttgccaggtgtcgagacatcggagacaaagccaatgtggcactcatccaaaatttcataggcagcgtcgctgtgctcgtgggagacctcatctttcaggatatccgtcacatcctgcccggcatactccaggatcagatcgccaccaccggggtgcgcgtcgaggaaatcggtgacatcgtaaacgttacgccccacggtgatgtagcatgacttgtcggtgttgtgggattggacgtcggcggaggtcaacgttggcagaactctcccaggcatgttggcggaaatgcaagagaaacaaaataggggaaataggggaaaggaaatagccttggaatagtaggtagaatgggagatgaaaatccgaaaggcggcgaataataagaattaatcaggggaggcgtggcgtgacaccagaagccgagaaccagggatccgcctgctcccggagccttggaaattttcgaatgctcaacttgccattggatcaggcaacaaggttggacagggtccacatcggacttcgatcaatagcctattagaaagtaactccttatttaattcgacacaaaaaatatgcaaggtacgcttacagatgtagttttgtacatctccccatctcatgtcggtggggctgttatatcttagccgccttggagaggcgcgtgagggacctcgggaggaatcgcggtctagccttagctcagctgttaagcttctactctctaacttgcttttcaggcagcttatgatcaaggcggccgagtgcactagacagtagatcggcaagatggttatataagacaggagttgctgggacatgccaagaaagatgagacacgaagccggaaccatagaaatatatcgcctttttctgaagccgaagcattctgatctatcatatctgtgaagacaatggcaaaagcaagccaaatcggttggatagccagtggatgtaaggatcgtgtcttgatgctaatatttttaaagacaaaggactgtagaatatgtacggagtacctagtcaaggatgacaccttgtgctgagacaggagtttgacaaccgtcggaatttataagaagcttacattacctctgccttttcctaacagcctgatgttcccagatcaagtattttcgacagatgtgggagtccctacacgcgtgggcaattttaattaggtttttaaatatggttggttgaaaggcatcataagatttggatgaacctagaatcattatatatacttcgtaccaacgaggcagaaagagaccaagaagatgtatctttggattaataggaaggccaagttggtggatcagcaaggagaaaaaggaagtctagttaggaatggataaaaggagagattaacgtactagtcaccatatggacgtagcatgttctatatttgtacttgatggtcttccagctgtactccgtacatggacaacgatgacttccgtctaaccagatatagttagtacgtcaccacataggctatacctagataggaatagtcagcgccgctatccccaaacaggctagagttatcagttaaactgcgaaaccgctcaggctaagctgctagctcctttgacgagattctcagcaatcctccctaactccgaggcttggggactcagactggatttccgtttgccacccggttgatcggtctaatataaacacgaaaatcagcagccagaccccatattgaccccattaatggagacgatccccataagcacatcggcctgacaggaacagaaagtacctctcgaaacaaaccccgagatcctccagagggaaaggatctgtcaaattgaccaaaggcctatacgaagtacagcatactagtacacatccagtacatgctccgtactctattcagtgggcagtctctgtacgcgcccggctctcggccgggctaagtctccactgagagtctagcgttatcccgcggggctatggccggaacgataacttacaacgctattatgggctatttatcggcctctgcatggtcaattccaattttgaatcagggattatacctcgcactaattagtagtggagatttcagcccctcttccttcccacattctctaacttcttttttcttgtctctcttgtacttgtaatcttccctgtcctcatacgatatacccttctacgctccctctccctccaccgcccacaatgtcgaccgcagagaactggtcccccgagaacccaatcctggcctacctgcagacattagtgactaccaaaaagactcttccttatgggcagcccgtcgtcgtccacgcctctgtcagtcacatcaactccgcttcattgctgcggctggccgcagagatcggcccgcacatcgccatactacaaattccagccgatgtcatcgacgactggtccagcgacaccattgaacaacttcagtacctgtccaagaaacatagatttctactgtgggaaggaagcaagattctgaacccgttggtaaattttatgggcagagcggacgcgccgttggaaacgagacaggctttggccgactttatcaagaagtcatacaccagtggcccattgagaacggcgacatggtccaatctggccacctcgtgggcccccgcagctccagtggaccaacaggaaaacgatgtactgatccctaccttgcgattggcggctcgcgaggccgttgcgacaactgcgaagataatccaaaccgagatctctgccgagatgaataactactcgtcgggcgaggaggtagagatcatcatcccctccacggaaacaagcaacggttggaaagaattcagtccgaataatacgggatcgtccttacggaaatcgtcaaccatctcggtcaccaccgagtccgtgactctgcacgcgcaattccacgcagatgacggtgtcccaactcccccgcaactggcccgcagcgttgcactgtgtctacccggtaccattgacaccgcatttacccccgatttccgccaaagtacgataatcgccgcatgtgccaactccgactttgtcatcggattcgcaacgaacgagccctttttcgtcaatcaccgaggaaccgatatctttgaattggccttattcgacggcaacggaaatccccaagcaggtatcgacgctgcgaaactcgccaccttgccttatctcaacgaaaatgggaaatcgctcggtgtattctctcttgtatcacccactcttagcctcggctttgagtttgatcctgctttcaagcctaatggaagtgaatcatctgcccctggcaatgaaactccatacaaggtgcaatacctataccatgcaatcgggcaagcggtagccctccgggaaaagaacaaacaagaacaagaagcctccggtcttccagagagaacaccggtgggccccaaaatcatgcatattccagtggttattattgtataatgacagacagatagcgcttgttgttctgcatactcgctggccgttggcgagttttaatggcctcattcaagatcggcacctttggacttgagtatgtatgctatacgcccatcttgttttactttttgcgacctgccaatattttcaagcctcactcgtgtcggtacctacaccaaaagtgtctttacatataccaatgaatttgatgaacagataaatggctggcctaacttgtgctcgaatgtaaaatcccgaggtccattgtgaagataaatttaggccttaattatcaggctacaggcacgtgccatttcttagtcatattgtaggaatcgcctccagggctccaccctggccaaggtgggcatggagatcaacagtgaaagtgctttcagctctatagacattctactctatcttctctcgggtcctctatgcattaatgttcgtctttttccttataaagctgatcatggaatcaaattagtatttggttgccaaacagttgacctaattgacatcgaacaccaaccgccatcttcatgaacccattccgaaactcgaaaatactttgctatgacagtacataagacacctcgctggacagaatccccttgattatttacatccaatgtttgcctccacagccacagtttctcgccatatcatacccacagagaccttcgggaaactcgacagccatgaacccagccaaaaccccaggccatcaaagtgggctttctggtcaaaatgaccttcaacagaatggcgaagaaccgccaattacagttatcgccgcgaatggggacctaattctcgagtacatcgctcccggcgactcttcgtcgtcacccaccaagcgcaaatggcaggtggcaagcgagcgtcttacctcccacagtccatatttccaagcactactggatcccaccaagttctccgagggaagacagttcaatgcccagaagcaagcctggaatgaatcccagacaccagacccagcctcacagcatgcgctaccaacggtcaggcttcctaacgtccgctctaccagcatgtgcggagaagatgccattgagttatttttgaagattctttgccttgattctttggatgaaaacgaaagagctgtgtttgaaaatgagttgaagacccagtctacatcgcttgttgcgagaatgatcgaccttgccgattcattgaattctcctcgtgttgttcaggatgttctgcagaggattggatatttatatggaaagtcaaagactgcgctccttgccaggtttaattcagctttgttatcaatgaaggaagatcggattcgacagatcatcttcatatccgccttcctcgatgattcacgactcactagaatcatgacccacgccttgctggttgtgggctccagattctggataaatgggctagttgcccctgaagaagaatctttgcgctggagatatttaccaaatgggttagaaggtgggtttccattaatcccaactagtttccgttagctaaatcatctttctgcagaggaaatctattgccgacgtcaatatgttttgaacaccatcaccgatctacaggctcatttccttcgagtctacgggggtctggaggaaaccgacagtgcaaggtccgcagcaaacaacagaacattgggcagggcattcaccgcgtctgcacatacgctttttcaatctcgtcaattccaatgccgaggcggattcaacaacgccagccagtgcgacctcttccaactcggccagatgatccgatttttctcactgcgcgccagaacgatcttcctaggatcgacattgatagacccggatttcgactcagctccccacgacgatggtcacacagctggcgaatctaggaacgaccaacctccaggcccaccatctgatatcacagccatcatcgcctctatcaaacaatatcctgattatacaatcgacgaagcgcacaccggctgcggtnnnnnnnnnnnnnnnnnnnnnnnnnnnnnnnnnnnnnnnnnnnnnnnnnnnnnnnnnnnnnnnnnnnnnnnnnnnnnnnnnnnnnnnnnnnnnnnnnnnnnnnnnnnnnnnnnnnnnnnnnnnnnnnnnnnnnnnnnnnnnnnnnnnnnnnnnnnnnnnnnnnnnnnnnnnnnnnnnnnnnnnnnnnnnnnnnnnnnnnnnnnnnnnnncggctgcggtgtgcgtcgtcgcattatgcctgctttagagtgcatcgaaaaattcgtcttggatgaccgcggtctccttggtatcacccccgcagtctcggatactgctgtttcagacccatctcgaccctcaaaatggacgctttggtcagacttcacgcgcaagaaacacacagtcgacatttcttttgcgagagtcacggctgtatactacccttcggcgccgtcgaaaaatcaagccacccgctccactcaagaagaacttggacggctgttgtttactgctgctcggagggattggagtgcggcgggctcagcctgatgcttcgtacatgaataattaaactatttataccacaattcagaaacgccgggtgatccctgcgtatcgtcctaggccgatttaaaacttcatggtatagcctactttattatgacttgtgaaattctagagaaacggtggagcttgtcattgccaaactctagaagtctgacaataaatggtccgcattagattatgtcctgatcataagcgagtcaacccccaactaggtcatcaagtggagtttagcctgtaattgagtattgctcttcaattgaggaaagactgccagagatagctctatatatgattatatgatcaatgtatagcgcctagaggcaagtctgctcgttagcgcagattatttcctatgttaacacacagtagacataaacaagagagagcacatgcccagttgccaagttgggaattctaggtaccacgtcacaatgattgaaaacccaccatgacgaaatccgtcgccccctaacggcgtgtccggaaatacgacagaatgatccaagagaattagaagagaagaaacagtttcggccggtctagacttcgtgttttcgatctaggggtgcattccggctggctccagcatatacgtccagaccttgggagtacatgggactcgatgatctggttctgggagaagcttaaagttggaggttctgtggatgcgaggagtatatgtggactatggccttggattgtagtgatcgatgtatattagtgtacataacagaatatcgtatatgtttctttgatgccaatagacatggaatgaagcgtttaagtatcaatcaagacaatgtataccagcttccacaaaacaatgaactcgtgtatcgaattgtgacttgtagatggtctgggagaagttcagagaaacaagaatcacttttctctatagtgtctatatgaagacaggtgtggaattttctttcttttgatggcatgcaaatgaagcgacagaagaaaagaacccggatccagataactgcagagatatttttccaatttgattctgcgtcaattttgactttgatttttttctttttttttttttcgtatgtccattcatccacatagatatcaaccgttcaacataccggatcaccccagaagtaccccatgtcaagatccatgttcggaccagaggggaagaaagagcccgtgatctggccggtggctgggtcataggggaaacattcgtcatacgagctccgacccgagagatccttctcttgtttgatgaactgatcgagtagatccggcgcctcgagactgtaggattcagacaagccgagaggagtgttggattgatccatcgcggagcaggtgattgagtccagctcggcggagatagcatccaccgccactgctgcgggcatagtcgcggacggatcaaatgccacatcctcggctgctggctcttctgccatggcggagtttgcggtttcagggatatcgaagagggagtctgagtcttcggtgctggggaaatcattcacgttgattccgatatggggtgccaggcggcggaggaatccgtcgcaaagcttccaggctctttctgacgccatgttggtttttgatagtgtcgatagccagtccagggctttctttgcggctttggagaccatcgtctctttctccgggacatgctgcgcccggaatgccagctcgagtaggagaacagtaaccgcctgcatcagataatgtaatgtgcaccaccatggcgacatgcggtatagtagaactgcatcgggggtgtccgggaatagtgtaagcatgtggcatgcagcctcgacacattccgccgcggtcttgttgcagaactcgtaagtcttgtcctcctccgaggggggttgatctaagcgacagaggcacggccgggtgattccgattttggtgctgtaaaatagaaaggcgaggcccattcgctggctgatagggcattgggatgtctgtgtcgaggtgaaatcgtatgcagcaggaagattcatgaaccatgaatcaatctcaagcatcaggctcttgatggtaaactcggtgcttgcccatggagactgcagcgcttctgggctgtagagtttcactgtcacccgcttggaaatgctcgtcaaggaggccagctgcaagaagtaaagtgaagtgcaaggcggaagactcttgagatactcagctctgctcaattttttgtcgccctcagcaggaaaatcatttgaatcagaatcagccgcagattctaggtcctctgcgctgctgttggtgggcatacgctcggaaccactggatgtacggaatacagccgtgcctatcagccgagccacttcgtctttttggaaatcactctcgtcaaaaggaacaggcattggtgtggtgcaggagctgtcaatgatacacgagggacgcccagtcatgatagtaagtagatgatccagcgtatacaatgaccaccataccctgtagcgtatctctttggaagtgtctgatatgctcgtaccaacgttgcgcaagtgcaatccaagagccagcgctcctcgaactgcacttccagagagtttccaggccctgcaagagccgatattatgagtatataattgggatttgcaggcttggcaacttaccgattgatatgtcccgaggccactagatagaatgaagtaagcccctcgacttgcaattgctgtaggtcaggatgatggagaatttgatcttccaagctcaaggcccgcgcccttgaaaagtacatttggtggtcatcatcctcttccttcgcgtccgagttcgtcagctgcttatatttagccgcaatggcaaagatcaggttgagtatagcgagccacttgtttcctggcttgagagaaggttgactgaaaaagacctggaattgggggacaaaggttgaaaccccaatgattgggaaggatggatgcactgaagtcagataggcattgagcattttgcctgccatttcccgggatgggactccatacatatcactttggtctgcagtcggaatgtctagatcatcaagataatagttggaagccactacccatggctcgcttagattctccggtcgaggcgttagagttggagagggcagaccgttatcgtcatctgtgttgggaagagttgacggccaggcctcaaattcactgttgatctctttgctaagcctttggagccaagtaatctcagagctttttccaatgaaacccgttgctcgtgcagtttcatctctgttgaagtcctcctctgtttggtcgccacattcaagaggactaacagatgatgcgcgggagggtggtggctcagaacccgcatgccatgagatccttcgttctccagcggctgcaaggcatgtttccgggttgaatgccaagtcaggggccgattcctgggttggtattagacacagtcatcggatgtggatcaaacttcataccgctgccagggcaatgttcacgagttgctcatcagacacgccaaaacgattgctcagcttgctaatgacatcttcatatgcctgcacctttgcggataagcttgccaactgtcttttgtttttagtagatcatagacgtcagctcttgtaatgacggtgcactatatattggcccataccgcttggacttttcccgcttgccatcggtatagcagcagatgattccagcctctcgacagttgcggcatccggacttgtctccggtgcactttgtcttccgttgtctgcaagactcgcatgctcgacgaacgtgtcgacggtgaaacctgccaggagaggtgaaggcagattcggctccttccgctagtcgcgggatagccattttcttgccaacttcagattcaccttggagatgagagactgggttatcctatagatgctttatcagatcatactccttagcttagatcatgatttcacacttaccacactggaaaactgattacacgtgtctgcatcagtgcatgataatttgaagaggctctgttgctcattccatgagggaaatggaatattactcatggtgaaccatataaagattgaagctgtccactgagtgtcagtagaattcgcaactacatcttcctctttacttacttggatgaataaaggacaatgtctgggtcccaagagattttgatatatattgaaatgacaatatcaggaattgaccaatgggctgcagtgacatctgtcaaatcaaatagtcacaatgtgaagacgagaaggaaggttggattttataaaacaccccaggatctgacccacgagaaacatagactggggaaggacaaaggagaagaaaggttcgggttttcgggcaccgttgggaatcttaagctggtcaagctagatagatactctgtgatgacatgccatgctcgtttagggtaagccaacggcgcattattggctaccagtccaccgaattagggatagttgatttgcctcaagtgtccttgtagggcatggggcgaataggtcaacgttttcatgagcaaaataccttcttttggttattgaccacactatttgccatcaaccaaacattcttactccagagagagcctgaggtattggcttaaccatcagactacctcccccggtgatccattgttgagggtcagctttcggttgttagtaccgactagctctggagtccgatgtagtgaccaaggatcggatgaaagaggatgtaagctacttatacagagtcaacaacgccttcaacctcaggctgttcttcaattgaagttgtatgtagccaattccacgtaaaacatggaacatacagcattgaggcttagaaagggatatatagaccagtagtaaatagtaaacacctagtaaataacatccaggcccagacctcttcgaagtcaatctgacgtctggtggcgccacatttgacgttggttcgtccctggttggcattcaggccaggacacattcggaaagggaagagaaagcttgacggcaattctcaccatgtcttgtgtgtacgtaccccgtctttttgctctgcgagataatcctgacgtcccattacgtgatgattataaccttcaaatagggccttgtttgtcaggcaaccctaacaatttagaaaatgaactacagttatggatgttctgagcttatattaataaaagttaaaaaggaattggcttaacacgatcttggaagtaaagaacacgatccgaacatcattaggaactctatacagtagtccaggcccatttttactcaatgaggaagttgtctgcaacactgcgaacttccttcgagaatgcaacaccctcaccctccatatccagtagggaaacattgttgatgtcgacatccacgaaaggcttggtcttcgtgaagtggacactcatcgggaagaattcattctcgtcagcatcaatcgcctcgaactcaaagctgccagaggcattcgactgatcaacagtgcccaggttccagtccagactgtcaccggagacctcgtagaccgcatcaaagctagatacagcaggctcggtcgtgccatatggaatagtgacgaccacatcgcggagactatcgtcgcccgtgagctcatactccacagtcaccgtggtggagtcagagcccttgtttacccaaacggtgaatgtgattggaagaatatcggcattatcagccgaactggcaacacgccaccggagaactccgatggagttgttggcagggaagcgcttggtagtgtccttcagttggatgaccgaagagttggtgaagagagctttgtcgacattagggtgagtgcggaactgtgcgccatgtgtgggaatagcctggcagtcgagtcggagtttggtgagtgagggatcactgatacggagttgcatgtcacccttgacctcgaaagatttcaaggctccctcccgagtaagtgtggctgagatggtctcggcgattgtgagttggatgggctcccgatccgcctggagagactcgcgggctgagggaatgtcatgcactggagccgaagctcgtgcagccaccaatgggctctcctcctcaatttcgggccccatatcaccccggaccttctcgtagatatccgttgcctttgatttcttgcccagttgcatgcccttgccgcgggtgggaatgggcctagtgatcacgcagtcagcagtagtttcgcaacggtgaaattagaaaaccaaacgtacttggaaaaggactgtttcttttcggcctcgtatgaatcatagctgtcaggcacggaggggcgcgctgggggtgtgtagacggggtaggttggggttcttggggcggcggcgcgacctgtgcgagcagcctctttgcgttgcatttccagctgcttcgcctttctcttgcgctcctcgctggcctccagctctttgttctatcaatgtatgttagccatgaactaatttcactggtgattccacatacccgctcaatgatttcctggattctctcctcatgactctccatttccaggaaggtcttgatctgagtgagagaaaggttctcccggtatcccatagttaccaattcatcaaacgcactcaggagctcaaaggcattgcgaagaatctcccgctcgtctaggctcttgcagatgctggtagtgacttgcgcaaagagatggagactgtcgatgtcttggagaatgttcgattgacggttggtgatcagcacgatatacaactcatccaatggttggtacacgaagcgcacgttgtcttgctcgacagtagtatgctgggttccggagtctgccagcttagggaaggaggcgagaagggcttcaattcgggagcgggagatctctcggaactggcgcgagagaaccgctttacctccacgggtgcatatcgacgctgcgagaacaacctgttgtgtgttgattagtccaattccccgcggattagattaaaacaaggacttaccatggtgaaaaacagcacagagggagcacacaaatgacaggaaaagagtgatcaaagaaaagagtacagaaagtgatagagaagcgtagggttgactggaagcgtaggccctgatgttggttggcggcggtagggagctactctgttcacttcggcgacggttggcccgtgcattcacttcgcttagtcgtcgaccagatactttctttctctcttcacttcatcttttcccgcgcgttgaattccccaccaacactcagttcatcatctctcttgctattactcgtaatctttcactctgcgtatcgccgaggaaacttttctctttcactctcaaaccccacttcaaccgcgttcatggaacgtcattgctgaagtttccaatacgaccccagatctcattttcacgcgtttacttgctatgacaacagctcccttgatcgcctaccccacaatggaagctcccgctacgggtgattctatggagatggcctcgccctaccaagggccggctgacgatttcgatatcgacatcgacctcatggaggaccatgtctcgaacatggatagcgatatgatgggcgcagaggaatttacaaatacttctcagcctactgaactcaacaatgatgcgatctacgatgccgacatggccgatgaaccctccgaagggtcgatgatcgacgctgacaactacgccgatgaagacaacgatattgacgtgcaatttgaggaagagccatatgaggaagaaatgattgaagccgatcaggtggaggatgttaatattgccacccctatcattcatcttgaacctgccggccgcaatgaagatgctgccagccccattaaggaggatatcacagtcacatccgtggaacttctcgaagcagcacctcaagaattaagcgactctgcgggacttgccccagtttcagacaaagcccaggtttctgaagttgaaggccaagacacccagacccacctgagcacggctgttgatgaccttactgaggaaccatccggaaatgccatcagtaccgaaacccgcggccataatgaaaaggcagagcttggtgaagaggctaacgagacatcaaagtctcctttgacagaggctgaggtaacgcaagttcccaacgaagacccggagaccagccaaatcaaaccttccgccgaatattcccacgatgacgctgcgcacccagaggcgcagcctgtgtctgaggaaaatcaccaggttgcagatgaagaacactcgccccaacaggtcacatacatggatgaacctcttcatcccgtcaaaattctctaccaggattgcgagatcgccctgtttcctcccctcgagggagactcgtcggatacattcttcattgaagatgaagctttagcttacgacaacgttgatcaaatcttcaaggctctacgccaggtgcttcaaaaaaccatggcaggcaatgaggttttggtcatcgatattgacactctcggtatccaaataacagaggtaagtactctcttaattatcctcctggcaaacgtactgactcatcctatcaggactcgatccatacatcccaggtaaccttgcatcagattctagatctttacctcagactttgtcgtaacgatggcactaccgatcccgaagccctctaccttacactgagcaccaagcgtgcgttcccggccgagatcgcagatctcaatgacgctgcaatggaaggcaagaaactttctgaacttcattccgaacttcaatcttgggatgaatatgatgaaggcgagccaggttccgagggggatcttgttgctcatggggctgaggagcatgaagatgaactctactacaccaatgaggcccaaaaagagctatcaactacggaagtgcaaacggctccagcacctggagaagatcaggcgttagatggcgaacatcctcaggtccagcccgaagctgtctctggtgctcaatcagagattgtgcatgcgcaggacgaggatagatctacctccagggagcggagtgccgaggccgcacgtgagcctgaatctcatccagcccagcccgagaacacagagccagatcaccttgatgtgtctcgccatctcgaaacagaccaagatcaggaatacgatcatggcgatggcgatgtcaacgaagagaactatgattccgagggccggcagagtgattctactgccacgttagctgcactgcctggcgcaagcgagattcaagagcataccgagcatgcccctttggacgtttctgtgaacgccgtcacagatgaaaacgacaatgatcactattacggagagaatgccgagaacgatgatctgggagatgacgaatattatgaggatgacccggtcgaagatttagaggctttccaaaatgatatcactggcagtgaaaatgctgatgatgctcaagaaccagccgatcaggcgcctgtctttgatgaagaggacacagatgagttagatgccccgccgacagacgaagttgtctcggaaactaccttgcgtgatgaatccaagcacttttcccatgaccagccggcaccgccccttgacagcggcttgcatgacacctctgacaagaaggagaaaacaccagagcctgcagatgatttacttggaatcgctgtagacctgatgcagactcccccgagagatacagagaacgatgcccttgatcactttgagggcatagactacgacgagccagaggatgaactggatgcccctgttgcagctgatgatgggggtgccaatcacgagtttgacgagaaccattttggcgactatgacacccattttgaagagtcggaggctgtagagttggttggaacagatccttcctcgacagacgccgaaacccacccgaactcgtcttctaaacggtcccgcgaagatgaagatgactgggacttggtggaaagcaccattgacaccaaacgtcgccgctcttcgtaaactatgctcccattttttttttctttactcctggagatttctccaatctttcttcgtcatgcctggtgtccagcgagtctgacctttgatgacttgttccacgcgacccataaccctccgacatactgttaaccatacttgccagcaacgacctcaaccgatggacgcagtgtctcgtctcactactaaccaaaacaggtatgtcgacccctttccccagtacgcgcagcgcacgccttcaactttctcggggtatgcgctttctctttttttcatcccgcatctgaatcaaaccccggtgccctcaactcgagacatcattcaattgcccgtgatctcttcctgcgtttctttcttttttgtcctttgactctttccccattgcgattcaagataccactgccggtcttcggccaaaatctttgctttcggtgttcatggatgcccgtttgggctgcgtgcttttcgatgcatttccttagggtctggcgtatcggcgcgatgggctagtccacgtggttgtagtattctaccaatgaattttacccacatcttttagttctcaggcgtctcaacttgtaaatctcaagtataaattaagaggaatctaaatgtccgatctcttacccccagatttgaattagctaatttcgcttatttagttatggggcccaaatgagaaacattccggggagagcgggtcggcatagtgtagaatagatgtacatgtatgttttgcaggtataaggaactatagtctatatgtacgatgtagattgtacgctattgtacgttagtactcgatgcggatggtttatttttacattcaattctatattgattcagccacgcaagacgatgtcatgctatggatctaaactggagttctctagggattccaggctaagtatagaaacctacgccgcattcggcgggctgaaacgccggtcttggcctcatttcagggtccatatttaataaatacaaagatgcaaagatacgccgttgactagctactggactactgcttttacctctaggtagaacctggggacagagggtgacacatggtagtgttgtgtagataataatgcactaaatcgagtcgatatgtacaacatagttaatagtacggagttggggccacctatttcaatctacctcgatctctgcatattttatataaaactccagaatgcaaagggaaattaagattaaaaattacctaaagcactgcaacacggcacttgaaccttggaaagcctccctacgcctccccaagccctctagccctgttgttctcttacgcgtcccccgatcgggcttgaaacggaaccccaccgcacgcaggcacatctctggcttctggcttgcttggccatcacctcactatcttcttcacatcctccttactcatcagaaatctcgggctggctcgtttttctgttttgtccttattcgctccctttgcctccccctagtcccgagcctttagcctattaccacgaccccttccttcgctcacccgagtctctcgctcattccccgacgcattgccggcactggaggtctttcgacagtaggagctcccggctcctaagataggaatcactcaagatgcttccagataagtacgtcgcttccacccgccgaattggcccacgacggcaagcttgtcagttctaacatggttgcgcgctgcgccattatagatatgtcgggcttattttagccattgtatcgaccatggccatcggcaccagttttgtgatcaccaaaaaggttggtgtgcccatcctccagaaacggacgcttcgatcccgagtgcgcgagacaaacaccgcggcgattcggtccaaagcgatcatcatcggagcggagtcgctaatgcgtctgaatacagggcttgatgcacgcctccgaacgacatggatttgagggcgaaggtttctcatatttgaagagtcccgtgtggtggggtggtatagtgacacgtacggaaaccaatcgtcagattcgacaattcgccagatgctaacgggttcatagtggctcttggcgaagtcgcaaacttcgctgcctacgcttttgcgcctgccatcctggttacgcccttgggtgcgctgagtgttctcatcgggtagggatctcttcaacatcgtgcattcgcctcatagctgacatgacacaacacagtgcggtcttgagttcgtacttcctcaacgagatacttggtgtattaggaaaactaggctgtgcgctgtgcttgctgggatcggtcgtcatcgttctccatgcgcctccagacaagcaggtggagaccgtcgatgagattcttggatatgcggtccagccaggtacgaagacttgatcggtgtcgcccaaaaactaccgctgactttgcgactaggattccttctttactgtgtcgcagttgcgatcttctcgactctgatgatctaccgggttgcgccggtctatggcaagaagaacccgctcgtctacatctcgatttgctccactgttggatcggtctcggtcatgtcagtcaaggcctttggcattgcagtgaaattgaccattggcggcaacaaccaatttgtccacgcgtccacctacgtctttgccattgtaaccggattttgcattctgacgcagatgaactacttcaacaaggcattgaactctttctcgacttcgatgtgagtgcagacatcaagtaatatggagatgcgaggctaacatgattcttcaaacagcgtgaacccactttattatgtcaccttcacaaccgcgactctctgtgcctcgtttattctcttcaagggattcaacaccactgacgccgtcaacaccatatctttactctgtggattcctcatcatcttcaccggcgtgtacctcctgaacctctcacgacatgacccggatggacacagcatggtgaattcaaaacttgacgaggatggagtgccaacagacggtatgacgagtttccagacccgtcgctcaatgcagtcccgccgaagcgagtcgagtgcatatttcaatggcaccagcgaccgcgaaggcctcatacacgcatacgatgtggagaacgggatcggcatgaacaacttgaccgaagaaagtaatggggagccaggcccgactttcccgcggacggatacgcagactgcactgcacacgaagcggaacagtcagctctgatcgcggatgtctcaaggtcttccaatcctcgccttatatcgaggtctttgaaattattctccttcgtctttacacaatcgactgctagcaagcttcccttccacgggcttgatctccacttgtatttttactgttccccgaatatgccagagttgcattgaaactcgggcgaactcaggcactggacatgtctgtatgaacgactggatatgactctgggtttctctggatggttgggatttgatgtctttcttcttctagttccttttttttctttttttttttttctaccggtgatctggcgtgccgagaggcttgtatatagttcaagttggatttctgcagaatagactggcgacgtatctgggtggggctgggccgatgatgtatttgcaggtcagctgtttatggaacatgcccatccgagattcttgcttttgcaattccaagttcaacatctttaaactattgccggttcttggctacctttgcgaggggtctatagacgtcaaccttggaagggcagagtgatactcccctcgaacgcggggaactcgcgcgatgcccactttattgcgcaaagtggccatcgtcgccgcagtcgacggtctggtcctacatcctcatgccagcgggtcgcggcatacgggtagtaacaatgaggcgtcatccatccgcatcgactataagacaaacaaaatcacagcgttgcccgcttccggcccggagcccctcgatggaaaggacgccctagagctagaggcctacggtctcgtaggtatgttgacgaactgagtgaaaaccgaaatagaaactaaccgcaatgcgctactgccacaggtctcttatctgtcgcttcaagttcattcctcgtttccatcacacagcgccagcaagtagcgcagatccgaggccgcccgatctacaccgtaaccaacgtcgcgatcattccgatctcatcgcaagccgatgcttcccgcgcaatcacacaggccaggaaagaatcctcgcaacaggaagccaccattgaatcctccgatgaagaggacctgaccgataacgaatccgacagagccgatgcggaagcagagatcggcagcgcgcccgcatcgcccactcgcgatgcatctcgtgtccgcggcaccagcgtcggcagtatcgcagaagacgtgatagcgaaaaagttccgcttcggcaggtttgcggccgattggctatcgcgcaaagacctgggattgcccaggcccggaactcaggagcaggatgtgttggagtctcccgttgacgaagcctccactcctcctccttcgggtaatggcagtgaggtgaatctcgacgctgtggatgagtctctgtctgaagaggctggggctcagagcgagcctgatcggcctaaatctgaccaggctgcggaattgctgccgaaactgcttcgctatacgaaacttttgtttgcatcgcataattttttctttgcttatgattatgacctgacgcgctgtttacatgtgcaggaagctcggaaagatcagcttcccctatataaagctgtggatccattggtatgtgcgaactgagggcttgtagtatgtttgaagattggcgtgctgactcgttgacagtatttttggaatagacatttgatgacaaaattcattgaccatggggctcatggatttgttctcccgttggttcaaggctttgtcggccaacgagaattcacaatcgctggtgctgaaaagaaacaaacttcgaaggactcagcagaactcgcgaaaggccgaattctcggtgaaaaagacgaggccgaagctgtggagactgatgctagcaaacgtgattatctattgactatcgtttctcgacggtctgtcaagcgaccgggtcttcgttacctgcgccgtggtgtcgatgatgagggcaacacagccaacacagtcgaaaccgagcagattctctcggttccggattggaccccgtctcaccctgcctactcatatttgcaagtccggggttccgttcctctttatttctctcagtcgccatatgctttgaagccagttccagtgctccatcactctgcggaaacgaatcttctcgccttcactagacacttccgagagttcagtcgacgatatggaaatatccaggctgtctctcttattgataagctagccggtgaactgaagctaggagagcaatacgagcgatataccgaagccttcaatgccgccggtgggatcgatggtaaaccattgaaacttgaatggtttgacttccataacgagtgccggggcatgaagttcgaaaatgtatcacgactggtcgaccgactgaaagatacattgaatgagttcagctataccatcatcgcagacaacgatatcctgcagacccaaaagggcatcatcagaaccaattgcatggattgtctagaccgcactggtgttgcccagtgtgcattcggccaatgggctctcgagcgtcaattggaaaatgaaggcattgacattgacattggtggtgactcttccacccaatggttcaatacagtctgggcagacaacggggatgccatctccaagcaatattcatcaaccgcggcccttaagggagattacacccgtacacgcaagcgagactacagaggtgccctcaacgacttgggactgactctttcccgctactacaataacatcgtaaacgacttcttctctcaagcctgtatcgactacctcctaggcaacgtctcaacccaagtctttgacgagttcgccatccagctccagaccaccgatccaggaatctcagtccaaaagctccgccagaacgccattgacacaagctgcaagatcgttattagtagcccctctgaagaattcctaggtggctggaccatgctcacaccccgccaacctaacacccttcgcaccctaccattcgaagaatcagtccttctcctaaccgatgccgcagtctacagctgccgcttcgactgggagaccgacaaagtgttgtcctttgagcgtatcgccctctgctccatcgagcgcatccactacggtacatacgtcacatccatattgacagatagccaagccgacgaggcgaccaacgtcggtctcgtcatagtctaccgcgacggcgacacaaacaccctccgcgtgaacacccggtccctgcagagcgatgtcgatctcagcacgctagagactaccgccagcgccaacagtgaatgggacctcgtttcctggctgcggggtagcaagcgtgcgacgacacggtttgttgcattcaagggcctgccactgtcaagtccggtcgctagtccgcggcttgggcctactactggtactgttcgcgagattgatcgcattcgctcggtctgtttggatatcgagcgggcgatgtttgcgggtcagggtgataaggctgaggcggtctctgtggttgaacagtctgatattatctctttggcggatgcgagaaagaggactgggtggttggaatatctggtttatgaccttaagaagatggtttgggcgtgattgctcttgtgatatagaggtgagttgcgggatttctcttccgcctcttctcttacatggctttcactcccaggttattggatcttaggtcattaacatctctttaagtcttttgcatatattccttagcattatgttgatagtattggatgtgtcgtaactgtcaccgatctcgaaaacatatgatcaatagaacagacagtttggaactatttgcttagggatttgacagtaagagcacgttagtatagtatcttagagataggcactgaaattattactgttctacaatatatcacccgtgcactgcctggtcaacatgtcacattttggcggtgtcagcttcaacctcaacttcatccaacattctaaccatccactcccatttccaggctgaaattttgcacacacatatcatgtgaaatgcagactatcctttcttcgcatctccttcttggacttgaagtctacacctaaacggactgaccgcctaccgtcttcagcaatcctttttttctgcccgcagcacatacacccctcagtctgaggtcgtccccgacaactgatctgattccgaccttactgcgaaatctctttggccaattacttctcgtcttatttctggatctgccttagcggatcgcagatttcagtcttgtttctttgatctggggcaacgaagggggcccgttcccacattttcggcggggctcctgtgctactcgcactttcgacctacatctgtcgcatcgagtcttcacctaagacaagatgaattggcaacctcagcaagagccattgaggcagttggctcgctaccttcgcgattcgctcaatgggactaaccttccagcccgagcagaagcagaacaggtaccggcgttccctttttttttttttttggtcctattgagcttcctctcaactgcgatcgccaatacactaccccaagatggaaactaacgttggaatcttttgttaaatagatgcttgcacaagcgacctcttctcctgattacgtcaattacatcacctatatcttttccagtccgcaagctgcttccctggcgggaattaacgagaacgaatggcctaccgttcgattttccgccaccgtaaacgtcaagacgaagattgctcttgcttacagcacgatatccccccaaagcttggcatttatcaaatccgcggctctggttacactgcgcgacaccgaccacaatgtctcaaaagctgccggtaacattatcaccgcaatggtgcttcacggaggccttttggcctggcctgaaattgtcaatgagctgttgacgactgtcgctaattccaacggggatgtgcccatgtcggctagagaagctgcaatggatgcgttgtacaaggtctgtgaggacaaccgcaaggttctggaccgggactatcagggtcaacgtcctctggatattatcattcccagcttgctacaattcatttcggtcgacagttcgcgcattcagattgctgctctcaacgccatccatgttttcttgccattcaaacctcaggcattgatggactcgctcgaccagttcctttcgcaattgttcaggattgccggtgatgaaaataccagagtccggcaaatggtgtgtcagtcgttctcccaacttgtggagactgccccggaaaagttggccccgcatatggaaggattggtcaactacatcatcatgcagcagcaatcccaggatgacccagagcttgcacttgacgccgccgagttttggattggtgctggagagcaagagcaattgcaggccgaattggcgccatacatgcacaagattatcccggttcttcttcaaaacatgatctacgatgaggaggaggtggctcggttgatggacgagcaagacgatgccgacgccgaggaccgcgccgaggatctcaagccacagtttgccaaatcgaagggtgatcgtctaaacatgtccaagccaggtgaacaaccagaaggctctcgcatcatcgagcaacagacagacgatgaggacgacttaagtgaaggtgaaatcgaggactcggaattcggagatgacccctcgggtaactggactttgcgcaagtgctctgctgctgcgctcgatgttttctccaccgtttaccatggtcctgtctttgaaatccttctgccatatttgatggaaaccctgcgccatgagcagtggccgaatcgagaggccgctgttcttacattaggcgcagtcgccgatggctgtatggatgctatcactccccatctcccagaattggtcccttacctcatctcactcctcaatgatgaccagcctgttgtgcgacaaatcacttgctggtgcttggcccgttattccggttgggcagcccacctccgcgatccagcccagaaagcccaattcttcgagcccatgatggaaggtatacttcatcgcatgttggacaacaacaagaaggtccaagaagctgctgcatcggcatttgctagcctggaggagaagtcagaggataacctggcgccctactgtgagcccatcttgcgccagttcgtagcgtgcttcaataagtacaaggaccgaaacatgtatatcctttatgattgcgtgcagacgctcgccgagtgtgttatgaacgagctggcgaggccgcatctaatcgagatcttgatgcctgccctcatcggtcgctataactacatttctgatgattctcgagagctcttcccgttgcttgaatgcctcggatatatctctgcagcctacggcgatgcatttgcccaattcgcgccgcctctcttcggtcgctgcatgaagattatttacggaaatttgcaagcttctattcaaccgacacacgccgcggctgacgagcctgacaaggacttccttgttactagcattgatcttcttagtgcaatcattcaggccatcgacccacaaaagagcggcgagcttgtgagtacttcacagccgtctttcttcgaactcctccgctactgcatggaggatccaaactatgaagtccgtcaatcaacatatgctttgctgggagactgcgctattagcatcttccctcagttggagcccttccttcccacccttaccccagttttgatcaagcagcttgacttggatctgattcgcgatgatgatcgtcacacgggcttcagtgttttgaacaacgcgtgttggtcgtgcggcgagatcgccgtccatgagaatgccgcgcttgcgccctacgccgagcaactataccaagggctctttgcaattatcattaacgaggaaatcatcgattcggtgaacgagaacgccgcgatggcgctgggacgattgggattctgctgcgcggaccagattgcgccccatttgagcgagtgctctggacctttcctgaagtcaatggacaagattgatttcacgcgtgaaaaggcttccgccttcctcggattcaaccaggtggtgatgaagaatccgcaggccatggagtcgagcctcctcgactacttccaggctattgcctcgttccccgcccgctcactcgcacaggaagagtaccgggacatccaggtgtctttccaacaggtaaggttattttccctagttcagtcacatgccactaatcaagatgtacaaataggttcttcagggatataagaccttgatccctgacttcagcaacttccttggccagctccccccagccgtggcccagacactacgcaccgtataccaggtctaagtcgaacttggtgattctacttagatcttgaccgggatgtcgggttatgtccacttctgtctcgaatcgggcgcgattaggttagggaagagacacgagggatacccgggggattagtaaatagggggtcagcggccggaatttcacgttaatagaaagaggagggagaaagggggggcaaaatcatgggaaggagcatctgcgatttagctgtttttttacgttacatctcatgattgcaacaggggcacgcaagaccctttatgatttctatttcgttgactttgctttcttcttgattcttattttgcattctttgtgcatagacatcatcaaggcagggctggctcataggttgcttcatttttttttgcttttttgttttctcagcgctggtttgggggttttttgcgtggcatattcatatccccccctttagatagatacctagatagataggtcttcgtcgttaatgaagatctcaaacaattttctgagagtctggcatgtagagtttggcatgttgcagtatcctatagtttcggaagcatcttgttgagacgtttggcgctctcctaggtatcttttcccgctatacttaacatgctgtctcactgactagaataaatatccttcatgtagtaagacgtaaaattgctaacaagtatcattgtgattatcagggttgtccttgacggtgctaggttcgccatacccgttaatccagttagtatagacaaaccaaacattactactccagcaaactaaatatagtcagttacctagcattatttctacgttagcacttttacctgcctctagaacaaagctggacagtgccagcgaatatcacacctattccgtccacatatccccggcccccaggaaatcaagagcacgtaccaagatcgactcgctaaccttgaacagggagtggatggaaaaaaattaagatcagcaggaccctggcaatctccgaccagctgcaggtttatttttggctagacagcatgcacagctagttaaatacggagtaactagtcaagtactttgtagttacttgctattaataacctagtagatgtataccacatccagcatatacatcaccaaactgtaagaatagaatcaagaataaacaaccaagcatccaatagacctctgctgcccatacgattcccatcaagccctaagtcccaaccaaacccaccacgaatccttcattccttcatagcatagtaagcagcaagataaccgtagcgaaaagataaataaaaagataaccagtaatatccaactcccggctctcgcctaactggcgcgttataattaactcggcagtcgaaaccaacaacaccctccccccgattggccgctcagacaaaaaccgcccgaaataccaagacgcgagcctttcccttaactactctttttcacgaactcggaaccgaccccaccttatctcaccctgggatttaaataggtgtcgatggcagaccgttgatgcagggtgcagggtgcaatctatgtatgtacctacaggtaccccgtagcataccgggcgtttggttcttagtgctgcgtagtgcgccattgccctgggccgtgtgttggtcttgttggtctgggctaactaattgactatgcctcttgcggcttgggatggtgtgatggaggctattgtggactggatttgggactgcttataggtccaggtgttgtgttgtgttggtgcgaaccgggctttctttggattatacttcgtacatattaatcctctcagggtcttgaaatgcgtttagtgtttacagttataggttttgactttgtcgggtattattttcagcctcagttgtaatattctcttggtatcttgtccacgtccggggtacgcttgcctcaactcagacctgagacctacctgcattatgcatattaggaaggttaacttccaaatgacgggaagctaagagttaaaccagatttattcccttctctaaatcacactttgagagaggcgaaacaagaaacaggaaataggaaacaggaaacaaacaccgcgcctgccactagaagcattccataaaattcagacggccatctacattcttgatacagtctgccagattcacctcactctcttgcacgtttccctggccatcatcgagttgcgcgtgcagaatgggattgttttcggggccctctagcttgaaatcaacgtcgcgtgcacattttgagaagtcgtgagcgccccaagccaatcgtcctattgattatatattagtattgaattagatatagataatagtatggtatggtctttcggacataagggaaacaccatgaacagaacgaacagagtttggatgatccttacccttatttaccccaatgaatccatccagatctagctctgaatatgtcgtttccccgcccggtttctggcagtaagcagtgaggatgtgcttatccttgacattgatgccatttgatgatttgtggaagcccatgctggaatggaatatagtaatagcgggtacaggttgataaatgcgacaggctgtggtatagtttgaaagtgaggctcattatatgcaggaatggcaggtatcagattattgcctctaatgacatcgatatggtgtcgatcctactgtggccatttggaatggcgaatgcgggtggctctgccatcatggttttctcattatgataggtacccggggtaaggggttgatagtataacagcgtaccccatgtcagagatgccgaggaacgattccttgctgggctactgctgtgtctaaaatagagtggtctttacccaagtggaaggtcataatgatctcatgcacacctgctgtcaacctcgcgttcacttgtagctgtcgggcattagtttctgtccggcaagaaggagcacagagatggtacgatggtggcttgggaacagagttgacgctaaggactctatttggttgggattttatatctccaggcttcgttacttcaaggttaccaagactgggaatcaagattgtcgatcttcacgtggtatgtctcctaaggatggagttttgggtttatattttatatttttatctccacttttacagcgaagaatgtagaaatatatttagttaatgcatctatcaacatgtacaagtacattctatgatccatagcccattcctccgttagatcagtattgtagattgatctatgatctacaagaaatcccagtcccaccagtccaggatagcccaagtcttggcagaatagagttggttagcgtgctgcactcccacgggctgtgtttctgggttagcggaactggggacttcatgattcaggtgatttcgctttttctggttggggcacttggattccaaggatcgcactcttctgatatcacggggatcgcaatgttggcaattccacagagggagagggtaagcgaagaggaaaaaaaaaagatttaaatatcccctcccgtcaattccgaaatctgacgcaaaacggttagcctaaaaagagaccaaatccataaatcaataaagctgatcaaatcaaagaaacccactcgggacttttggcccccaagctataccaaggttggcctgatgttgcgacaagcgagactgatcgctgctgattggatctatcgcattctgtgttccttcacatctgcggagaaattagcgtcgcccgaacatttccggtggcccgcacagcgatcgccattggatcttccgaaagcctggaaaggaaggcagcgtattcggctctgcactgtcaaaccagtcaaacaggggagattgaggatgatgatctaatctctgtacgactaactatggtgccacgtgtgagctaaataatcctttggagtaatcatcggcatggctgcagtacatcgtgaaatatagggaccggccccgtccagatcggaaggggcacacaccgactttagacattgacgtctgatccccagaaaacgtggctctgcggtgttctaaatatgcatacattgaacctctaggtcgggactgagtagatatacttagatttcttagatgctgactcggctagaatgatgctgttccaagcgacattcctaccgttttggactcagcccaagccctggaatgaatacattccattccatatatgtaccaggttctctttttatgatcatcctgaatactcccgcggaaccatctcatgaagtctctctcatccctgcacgccagggactagaccatcgggctcccaagacctattgcccacttcgggcttattgacgtatgctgtacactttcaggctcgtcagacatggttcccctacgttccagcccagtggtaacttcaccggagacggagatagggtggttccggcctggggcaacgatcgcaataggtcaatcagtctagggtgtcaggataagggatgcgcaaaaagaaaaatcaagaaaaattgagatgtgcggtgatcccgagagactggtcttacacccccctggtcggggactaaacgtacacctgttggttccaatccccaggttcccagtgtagagtttgtttcttttttcttttcttttcattttcacacaaatacctatattgtataactgttgtacagaatttccttccggtccactttcggttgtgatcaccgaggtcggcgtttaatcccccatctgactcatagactccgacggagtacggagtagaaacggccgacttccgcctgtcagctaagcttgacactttagcgagactcgcactgcatggggaatggcgtctacgatagcgcaaggattgactcccctcttttcctaacggggttaacggtgtcccttgacagcgacccacaatccagggtccgccagatccaaagccttgcgaggcaaaggggtcgatcggtagtacggagtatatttccctgcattgtgtattctatcatttgaaatctggggtctggtgtcataggcccctgcgtatatcctcttggctgggactctgttctctggaacgcgggatgggatttataaaaagaaaagtcaaaaacagacggatagatgcatcagcttgaagtcacccgtggaccttttcttatttgtaatcatctatgacctgcaatgctggatatggtatctgtaatctgtagaactagaaccttagtaactatccaaggctagacggttcctaccaacagctagttcggctaaagaaattataaataaaatacaaataaataaataaaaagaatatccacatggattgtgcaatgtcgaacctatccctgctctcccatgcgcctagtggatagcctagcctatagggccgctatataagctacccatgtggcccacccgacatgactgagtgctatattagacggtccgttttagggttttcttttcttttcttttcttttcctgaggtatttcctattttattttctattttcacttacgtaggcatttttgattattctatttattccttctgggcttactgcccctccccccctgtacccagaggctcaaaatctcgatcgtcagaaatgaaaaagaactagaaataattaggaaaataattcgagaatccgaaatttaaatccgtcagatcatatctcttgcgtaccctggactaatacaatttcttcccttctcctctacttcccccatctcccctcttaatcttcactttaagatctccagggctcgtattctccacgtgcttaattcaacttatcccccaaacctcaaccgcccccaaagttatttttggagaccctgttggactcttcccttcctctataactacagggcagacgtgcccatcaactcgttcgctacaacaccacctgtggagtccttgactccagtcccggttctcccccaagcaacaaggccaaaatggtcggtccaggtggcggtccaccgcgcaagagccacaccaagtcccgtaacggctgcaaaacgtgcaagagaagacacatccgatgcgacgagacctttccgcaatggtatgtgctgcaatccccaccagaatctccctactaatcccatccagccgcaattgcacaaagcacaactgccgctgcgactaccaggatacggttgcctcgcaagctgggagtccccccgccccgcgtcagggtcctgacctcctcatgtcgccagagatcgaaacgcaaatagacaattggcatcgcactggcgtgcctccgtatccggagctcttgcagtgtccgcgagctgggtggtcgggcttgtcgcgcactgatttgcgcttgattcactatataattggggcttctattgacttgcatcgtcgagggctaagtgggtgcacggtgtgggcgcagaagatgccgaagtgagtgctctttagcttggttggtggtctttgctgacgggtgcattctatagtttcctcgctattgcgcttggcagcgagttcgtcatgagctcgatattgagcttctcggcgtttaatcttgcttttcttacgcgagacccggagaccaaacagctggctttcagtcgtagactcacagctcttcaaggattgcaaactgctctagggtctttctcgaaggaaaactgtgatgcaattcttgcggcttctgtccttctatcatggcaggcgacagaccagtgagtgttatatgtaatctcccttggatcccgactaacaccaggtcagtcaaaattgggcatctttgcaacacggcatctccagcgtcctggaatccatgcatccatattggaagcaagagtcagatattgcacagtcgatagaaacccaacgaagaatgagcacagatctttcaatgcctggggtctacaaagcccccgacgaagacatgatacatttggatcaaactatccaggccctacgaatgacacagaaacgcgtttcccacaaccccgagcactttgaacgcctaggagacctcatcaaattcacccagaaattccgcaatgatttccctaaccaaacaaccgcacaagtattcgaaagcgtccaacccatccgccgctggttcttctggctcccagcatccatgctcggacgcggcgaatcagacatcagcgccctcccaatcctcgcccaattctttgccgtcggcatctctctcgacggctgcttcccagagatgggcggcgcatacctaggcgccttactcgtcggtcccatagaagagatctaccgcataatcgctacccaccacgccgcagaccccttcaaccccgatctgcgtctacccctagaactcatggatctgccccgcggaatcgtcgcccgccatcgcagccgctgcaacctcccctggtccccccgctcatccgtcgacccttactctccgggcccacccagcccttttcaccataatctgcacgagtactcgctcgtcgcctcctcctcctcgcctgcttccgcctccacttcttacgccgcgtataccccacctttgcattcccctcctgccgtcactattgccaattctacctttcccgtccaagacggttatgcctccgcaacccccattccacattctctatacccgccctccccgcattctctgtacccgccctccccacagctcatcgatagccaggaccccaacctcggtctctcggatatgggtcatagcaacgcccatcatccttcgatccctcatccagcggcttacaccccaccgtatggcgacgggctgtgcgccagcttaccgcgcacagacggcacactcggtctcaatatggaggtctatccacagccacacccgtttgaaatgccgggcttggctgcgcccacttcactttggacctgattgtctgctgtgctgagtttatttatacggaaagaaaagaaaaaatatggaaattctggactaccactctgaacagagttggtcagtcagattctggctattgaataccagggaattcgaagatataatgtctctcatttttgaaaatatgaagtctacggaattatgttctacgggaattggacctgcagaacatgtgatttaccttggatcattatacgagtgtttcgtttcacgacctgactacctatattcggaccttgttttgttgagcatgagcgttaatgtgtgatcttgtctctgattttatcggtttggtttttatacccggttacaattgcaaactgagggaattgtcccaacctggtattttgattgatatatatatgtagggtattgatatatgtactccactatgggtactgggcctgggcctgggactgtcgttggctgttgaaagacgcgaactagtcttactcggagttctcaatctggatatcaccgcatgaaggagcgattgaagtacccaatcttgcaaatccgggattttcgagccgacagctcccaacagctgccttacccctctatgtggaagtcgtctattatctttggagtattctagtacaatcatcattctcactcagtttctttggtattcgccatgtcatcgccagaaccttcgcaggctttcggcttatcacaaggcttcactacgaaactcgccatttccagtctcattctcttagtacagcgatctcccagcgcgggaaaaaagaaaatgacaatatctgacgccgattaggtcctctactggacctcaattgcattctacaatgtatatttccacccactagccaagattcccggtccgttgctcggacgcgcacctctagtatgtctcacctagtctatcctgcccgaattggacaataactgatccccaaaccagctatggcgagtcaaacactcaatgggaggaagattccacgtcgccatcgacaaagcacacaaaaaatacggtatacctaacccgagccctcacacaaaaaaaaaagaaacagcactaacaaatcccatcatcaggcgacatagtccgcgtctcacccaacgaactctccttcgcctcagccgaatcctggaaatccatctacggccacccggtcgggggaacaatcacaatggtgaaaagcgagttctacgagatgttcggatcaggtttcgactcgctgtgtattgcctcagagcggaaccgcgcgttcattcccgtatgcggaaatctctgacgccggctttctcgacgaaggctcttgtggagcaggagtctattgtgcagagttgtatagatgggtttattgagaaggtaggggaacgggggacgcgagaggaggggttggatttgagcaagtgggttgagatgttggctcttgatatcgttggtgagatggcttttggggagagttttcattgtattgagaatggtaggtcttgggtgattactgtatgagatgagatgttcaatggctaacgagttcaaggaaaacctcatcattggagtgagatggtgacatctcatgtctttatcgccaccctggtcgataatcttcgccgttatccgctctttaactatatcggggttttcattctccctaaactgacgttttcggtacggaatcggcattcgcagttcagtcgtgacaaagtcgcgcggtgagtccacattctctgttgagtgctcaagcacataggcttatttgaatacaggagacttgagagtcagtcatctcgaaaagacttcctcaccaatctcgtcgacaaggtgaagaacggcgaggttgggaaggaagaaatgactgcacatgcctctactctaatgttagcagagttctttcccttaccgtccatgaacctaattatattacagcatcgccggaggagagtcagtagcgaccttcctagccgctactacctattacatccttaaaagcccatccgtgcatgcggagctgtgcaaggaaacctgcgccagcttcgacaatctatctgatatcaacgccacggctgcgcagcagctaccgtacctccaagccgtcatctcagagagtctacgcatctacccgtctgcatcccagggctttccgcgtctgagtcccggggcggaaatcggtggcgtgtatattccccgtggggtaagctaaataagtttattctgtcactgctggcccaaggataggagttatatgtatgctaatattcgatctcctcagacggaagtctacaccagcgcctggacagtcacccacgatccacgatacttccacgacccttatgtcttcaagccctcacgctggctcgatcccgcttgcactgatcttaaagaagctagccagccgttttcccttggtccgcgtggctgtctaggtcagaagtaagtttctactctattggatacctttcttcacttaagtattttgatggtaaatgtttactaatcgacattgcagttttgcatacgtggaaatgtgtagtattcttgctaaattgttttatacctttgatctggaattgctggactccggactagattgggaaaaggagagtaggatgcacgttatgtggtggaagccgtcgcttcctgtaaggttccgagctagggaaaaggtttcaaccaaggaaatgtgagcagaacgatagctctagtgatatttgtgcctgcagacaaacagcctccagagccagatagccacacaattccataggaatctacagattattcgattacttctgactggtataacgctgcattcgcattctccaagagaggcacagcaactctcacactatatatatgtctgtgacattgaacacaaggaactaaaattgatataactactgctatatgatctagcataactatcctacaaccttaaatagtatgttagtgcatcgtcttggcgcatcctttcaaactcaccctaatcctaatatggactggggatctgttgcagatcataagtttacccctgaatcccgatctgagattgtgcgactctgttacacccgccgatgcacactaagcatgtgatcggttacaagattcagagtgggctctattagggttcgggaagcgggaagcacggttagtagatttgggtttgatactgctccaccgagagatttgtagcacagggcagaggtagctgtgttacaattcctaccatccttgcaagcttctgagatatgatatgacggaataaactagttagttaggtaacgaactagtgagttatgatgagttatgagtcattatgagtggccagtgaagatcgcctgtgattggtcagacaagtatagtaggagaagtatacttcatgttcactatcctcttggagtaacttctgaagcactaaatagtgtcactgtgacaagcctgtgttttgagggctataccatcggaatgtcagaccaaggcgcagacctgagcgcgggctcttcctcccctgtgacgcctagtctgcagttaaaagaacccgagaaagagattctccagcgccaaatacacactccaaagtgccatatgagtcgcctaggccttttatatacatgtgcaacaacctatgaactacttgtcctggccatcagctcaattgcagcgataattggatagatgggataaatcttctatttgcagcttgttacgaccccgagggtcacttgcacaactggcccgtatgggccgacgtacttgctaagtaagcgccaggggtatatacacaccgcgcacatgagatttagaaccttagcgattagtctactgaattgtataacccacgctagggacctccactctaattcaaacctccatttttaggatacactggtagctagtcctaacattctaatcgcttcatttttacgaattagaccactggaacccataagatacctcgaaatacccgtagcagaagccgggtgttatagggagatatacccctacctgccggttaagaaaaccaaacgtaggatttacaaacccctactgagataggggccatacctgccaaaagagccgctcctataaaagagggggctgcctaaccgataaaattggcaccagctttaagctgggatcttctgggctcgacaatttccctcaaagctcaccacgaatgtagagagtaaaattagataactagataaaggacttatattacttatataaggaagctagatatattataagaatttacctaaaagctaagtagctttagaagaataacttaaaggagctaaaaaaatagataaccctatactataggctataatagtactaggaataacccttagagagggttagtagaagggctaaagtatattagtatataatatacttatcttagatatttataagggtgccctaataggggttactagaattctaattaatagtagggctacctaaacctttattagctaaagataggtaaaggagaatctagaagatataaaaggaataccctacttagtaaaggcgattaataggtataaaatctacttatatagtagctgagagattactctttagcttatagatagtattagaagatatagtattataaagatatactataaggctatcgatatattaggatataatatagtcttagggatagactggctctatacagtaaatctagatatcgattagaatactagctattagttatactataagggtaccctattagaaatagagatagtctccctagaagagtttaagaaggaactatatctatatagtatcttttatatactttatattagactactagatctattagaagaaggtaaacggttaggagctatatagatagataacctcttactataagtatatagagactttgtagatatctttaataaggctctagcttcgatcctactagaatatactatatataattatactatcgatttagagctagggaaagtacccccgtttaggtcgctatacttactattaaacgtagagttagaagtcctatatacctatattaataagaaccttaagaggggctagatctaatatttaaagagtcctataggggtacctattctttttatactaaagaaggatagtaaacttcggctatatatagacttctatagattaaatataattactattaagaaccactactccttacctttaattagcgaatctctattaagacttactagtataaaggtctatattaagctagaccttagagatata

SEQ ID NO: 18 - DNA, 168640 bp, Penicillium roqueforti
  misc_feature (5048)..(5222): n is a, c, g, or t
  misc_feature (67662)..(67896): n is a, c, g, or t
  misc_feature (102419)..(102745): n is a, c, g, or t
  misc_feature (131722)..(131819): n is a, c, g, or t
  misc_feature (140200)..(140427): n is a, c, g, or t
  misc_feature (161912)..(166622): n is a, c, g, or t
cacaaaatacactcgccttaccaccgtttttccgtcagaaactttcctattgtctccgatcgccagtcttgttacatcagcagatggttgaaaattcttcccatatttgtacggaccaaatggcttccgtaaaaaggtattacctcctattatccaaggttgtatttttcatcactggcggttgtgtaaaagttgtcattgagtaggagtagtgatatagtctaaacatatatacaagaatcaaacgtctaccgtttgtaaagagagataagggattatagcgaacaaagagtatcaacttgaaataaaacaacgctatctatcactctgtcatctatcagtctatacatcaacttatcgctctggtaaattcaaccggaggtttaataaactgcatgaggccgctagtcctttcgcgatgtggcatagagaggaccagaaagtaataactcaaagtatggaggaactattaacggaatgtaaaagcattatggtactcaccatggtcaacagacgttcactatcggtcgtgtagctagctcaccgactatctccattaacacatatttgttgtaccataacactagaatatctttctcgcctactcaacatcctttgactctcaaaaatatcgctgctattcggatttcaggtagatttgatgaaatagagctcttatcagtgtcaaagtcgagaattttgagtgctgcttggtgatggtgctgttgtagcatataatcggtgtcatgtgcctcatacagagaccccgagggattttagggctcggcataggctacgtattccttttcacttatttctggcgagaaccttgcctggagttttatggttgcacaattttatggtcgtgataccaggtactagtaactagtaacccgggtgggtctttatcaaatgacagctggcgcgaaatcctggtcgtatctagggctcttctgttcaagggtagcagcataagagttgtgatcaacaagtgggggactgcaggagacgtgtgaaatattgtataatgatgtagccgtacgaccatgacgaagacttacgaaatgtctaaggaaatccgcaccatatattggcccgttaacatctttcaagttcggaattggaaatgcaattcacgctactggaaagcagagctgctcttgccagaacgaccagatcatcgcatgggcggtgcttccccgccaagaggggctgctactggaaattagcgcaatacgatatcgtgttagggaacttacatttctcagagacttgattgaacctgccgtctcggtagcggacaaaaatcccacagcagcggagtcgattggccatcgatccaaatcattcacgccaataatgcctttatctttgtcatatttctgcatgagccgcatcgtaataaacggaagggccgcaacatatgcggcttcggattgatctggtgtacaatctacacaaaagtccaaacacgctgtgaaatgtgagacagataacgcaaggatgggctaccaacaaacctatcttcaggatcccgtcaataccaagtaatatatcgtcacaggccagatattgatgtgcaaggccagataaagccaaatagcgggcaccgtcgagaatctaaaatgtcaggacaactctatcggacagccatgacggacaaacctggcatataatagatcccaattctgcctcgctgggatacacagatggaacggcaacaacatgcgcgagagtcagcggcaagtcgtcaaccaagaagaacgcgagatcatcgtgcatatagcattcatataaggagagaacgttcgtgtgttcgagacgtccgaatctatgaattaatctgcgagcagtttcttgcggatatgtccggattgctaccatgcgagatggacgggtgcggcgtgtggcgattgtgactttaccagcgatctgataggtaatgacttcccgataggtatcccacggcgactcctgtcttacaatcaagacagttgcaatgttttcgataccacacaagcggggcagacaaaggctcttaggaggccccgtgacaaccttcgatctactgcggcggcgaagtctgcttggcttcgtggtggtcgccatccggctttcgtaggtggtggagtttggcatcgagatagggggctgaaattgtgctttgatagtgccaaggtcacatatcatgttttctttgaatttgttggttgccatgataagataattatgatcgcatgaactttgagagaaagggatattccatcgcttttatatgcgaagtgttacggatgggactttcatcaatgataggagaccgtagcttcgcccgactatcatatgatgaggcttccatgccacggttgtcacctccagacagtcatcggcatatgtagcttgttatgactgatatctcagcctacataaaaatgagacccgagctaattgaagcgtaacatattggcctcccaactgcctcaggatattgttgctagtagcagctcattttgctatgagaacgttgttctcgaagagaatctagatttcatatgactggcagtgggaaggttaaaagaaaatgggagctactcgcttctttcccggtttttacatacacacacacacacaattcattaacgcccggcggctgagccgaaagggcaactatcgctaaactactatacatgtcatagtatatacaattctgtgactcattggagcccatacacaagaccttggcgtatttgtcattctcagcatgcagtgtcgcagcggatgctcgtgggttagtaagttggttagtagactggcttgaaggcgcttctccaagtgttcaacatcctatcttcggcagttgaagcgcgtccaccgtgaatagcacgaggtggttggtgggttagattagaatgaaagaggggtgatttatgttcgtcggcggggttaagtggcctcgaggcggcctgtggctatggcgaatcgtattgaggcccgtactgcctctaagtttggcgtccacttttgatcgtcggaaggcgacttccctcccaggtaaaagggcagatttcctcggtgagtgtcggtacattgtagcatatccgtccggtgtgtggtccacttccgacatcgaaagaggaagtgctccacagtttccttagcttgtccgcacgcacactgatccgtgtcggccgcgttgattcgatagaggtatccattcagtctcgccatgcccgtccggagttgggctagcacggtcgcttccttccatgacaagggatcatacagctgtcgcgtgtgttttcctgggagtgctgcatctactcgtttggcgtgctttccgacgtccgctggcagggtatttctggggactgcttgagaccgtgcgagattcagcgtggttgattttatcctcggggcgcgttcttgcaagagggcatcttcttgtgtcgcggctctagcctgttctttagccagacctagcagcttgttgtcttcactggcagaaacccagcggacttgaacatggtttccgtttctctgcaaccttttaatcaacttgtatatccgacacacgaactcctggccagattgttgtcgagggttcctgagtgtgagaaccgccgctttgttgcttgtgagcagtgcgatcgtgtagtctttcagtcccgtcgccgtgctcaatacatgtgccatggctgccagttccgcagagaatggattctgctctgcccttacagccaaggtgatggatagcgctttgtgtttaagcttccgattccgaggtggtcgcttctcgatggccactccaaaacccaccagctcgtttcgtgcagagctgctaaccgcgacctgcatgcacccgcccgcttcggccagggactcatgctgctcatcaatgtcggtttgtacgcgttccgcccacggggatagcgtgaaggggttgatcgtttctaatgtctccatgtcgatgtgcttgagcgtatcggctacgtgatacagtggtgagcggtggtatcttctgaactttctgatctgatctgtacaccggcgaagaggattggtttccggcaaggtgtggatgtctgtccacattttcacggctcgtttccaaaatcgacgttgtgcagtagccatgtgagcctccgcctctgcgacactagtcgcgactgtgagaaatgtccccacaatggcttgcgcgcctactctttggactcggttgatcggccccatggctttatccttgcacgcgtgcatccagacattggaggcgtagtccactactggtgctactgtcgatgcgaatagctgtcgcgcggttgctggggagaggcctcggagtcgccgaagctccatcgctgcttcgagacccttggacgctgctctcgcgatatgctccttgtacttaagtctcgtgtccatcaagacacccaggatcttaacgtggtctttgggtaccaccgtctgccccttgatggtgaatggctcatggtccaatttacgcatcttgggagcaaagtgtatgatagccgtcttgtcagcctcaaatgtcgctccgcttctcttttcccagttgagtgcctcgttgatgatggcttcaattccttcccggttactctgcgcagtcggaccggtcacccacgcggtaaaatcatccacgaaagcgactgctcctccctggctgtcgatctgtctttgcacgaggtctgcattgaaaaacagaaatagaatcggagacaggggcgagccctgcggcagcccagcttgtggcaagctttgagtctcagataactgcccgttgatcaggatatttgccgttcgttccgagcagaaggccccaacccaacgaagcaagacctccggtatgcctcgggctttcatcctctggatcagtcgttctttgcatactccgttgtaggctcccttgacatcgaagctaatcaagctcagcactcgtcggccgcgccacgccgcatagatctgctcctgcaggaacaccagtgcttgctctgcggaccgctgctttcgagccccaaagtggctcccccggcggnnnnnnnnnnnnnnnnnnnnnnnnnnnnnnnnnnnnnnnnnnnnnnnnnnnnnnnnnnnnnnnnnnnnnnnnnnnnnnnnnnnnnnnnnnnnnnnnnnnnnnnnnnnnnnnnnnnnnnnnnnnnnnnnnnnnnnnnnnnnnnnnnnnnnnnnnnnnnnnnnnnnnnnnnnnnnnncgcgcccaaagggggctcgtcgggagcagtccatgcgtctccaccgcgtgcgagatcctctctgcgatcaccgattcgagtatctttccgagtgtcgcaaggagtgagataggtctccatgcctttgcaatggtgtagtcatctttattcggcttcttgagcggtatgatcttggcctgtctccactgtcttggcagtgtgccctcttgcagcgaggcttgaaagaggtcgaggaccctgtgcttgactgagggccacgtcatcttccaaacgatcgccggtaggccgtcttcaccaggtgccttccacgacttggccgctgacagttgccgctctatctcctccatagtgacggctggcatgtccacaggcgctctttgtggtctcactccttcctcgtcgatgttctctggcaaaggcgggaaaaacttggatatcaattcctccgcttgctccttgtgatcgttcgtagtggttccatcggctctgaggagctgcggaatcttcccgaacgcggcattgtctcccgacttgaggtacttggcggctttccagatgttgtcgttgtctgcgagaaactcgttccagtgcttcttcttttgtttgcgaatggcatcgtggtattgtttggccgcatcctgggccatcgtttcgagccgggggacttttcgccccgcccgtcgctcggagcgagcacggtttctccagtgcgtatatatatgacggagttgagtgaggtcagctgtccaccatcgcttcgcatgtggtgatggtttcgccctcggggttaaagcgtgtaccgcttcggacactgccaacatgagtcgatccgttttctgctgtaccgtgccctccgacggaaggatggctagagcgttctgaatcctggcgttaatctccttccatggtgcattcttcagtaaaagtcgctcttggtgctttgggcccgaccactgggcgtcgaacacggactcaatggcgcagtgatcagagccgtggtctgtctcgagtaaagcacattttgtcatggagtccgtcagattttctgaagctaggacgagatcgatggtagactcgcagtctccactttgtccgccgccgtgccatgtcttggtgccgcgtttaagcaagctactgagcgcaaactcattcataaggtcaatgatcggatccgcttccccttgtcttcccagcgacacctcgtctccaccccagagttgatcgtgtcggttgaagtcccctaccatcagaatctccaccacggcgcctgtctctcgtcgtacttttgtgatcgcatcgtgtaaatgattgcacgcatcgtccaaggctgagatattgcctccttcaacgtaaaccgatgccataaagatcagtcgctcggggagcctgaccatcgctgctgtgatgtctggagactccacagggacttgctccgcttcgacttctttgttgacccagagcatgctccgaatcgcccatctcccctccctccaggtagagggcaccatctttgtccacttgtgatgccccattggagtggtcaagagccggccttgaatcctcctcgcttggggttcctggatcgctagcgccaccgcgttttgagtgtcttcgtcattcattaaactctcgtgcactgcaccctgcttcctcacgttcagctgaattattcgaagagaattattcatgacgtgatggatagagcttccggcagttcttgctgtacgattcgtgaggccctccgcacggtacacactttggaaccggttggatacagtcgctgtggcgatggccctctgtagcgcatttcgcgcatttctgggcgttcttgcactggaatgccttatggcctatctcttggcagttgtaacattgtgtcggtcgcggtcggtgttcgaagacactagtcacaccagattctccccccgcgtggaaaaatccgtcggccaagagccttcgcgcgtcgatgcgtttggtcaggtaaaccaccattgaaccgtaggccttctcgctctcttttctgctcagccatgaaatcttggctacgttggtctcattctcctcactaaacgctgctgcagcctcggttcggacctcaccgctctcgtctagcacggaggtcttgttgacgctatcgactttgatcgggtagagctcgtcacggaggacccgagctcccgccccgattttctgttctgcaacctttttgaccagctgctgttcatcctcatcccggcaggcgatcctgatccggttggcgtttttcgggtcaacggtaacagcgcgacagcgccagtgcgcgtggccctctgttaactgtatctctgcctcaaccgctgctctgaccgagcctgcggaggtcgattttgtccctttttctgccatcttcgaggtatctatcgtgcaaaatagcgtgtccgtaaaggtggtgggtgtcgtgttcagcgttaaaagggaccgtatgttgcttgggtaactggacggcggagtgcgcgcgacatctgcgtaggaaggagagcctgcaacagcgggaacactgatttcctcgcgtaaggactggatttcgcgcaggatcgcatcgtggttgttctgagagcacgtctcagagtggcattgcggtgtcgtgtttctattcgtcagggactgtagctcgtgtcggacctccgcgagggcggtaccgaactgttctctggttctctgaatttcttccttgtgtatttcgtcacggagtctgatctctcgcctgagtttggcgatctctctcaccaaaccgccgacgtcgagctcttcgcgctcggtcgcggcgtcgtccgaagttacctcgtcacgccggtctcctagctcaattctctccttttgctgggaacgcgtctttcgtcgatcagtgtcaatttcctgctcacgagcgtagttgttcggtggtcgagtggtgcgtttcggtctcgccagtcgcggtggcgaatcttcgcgttcgtcacagtcgggcggttcaggggttcgcatcgcggcccgtcccgccattggtcacagtaactcactagacgcgctcgaaatcctgatgaaagtaccgagagacaagctacagtacttcccgaaactgatacgtactacagtaccccccagaggtacaggatgggtttttacatacagggaggatcgaaatcagtttcaccagatgcacacagagattatttctcgaaccctgtcatgaaacacgctatacccgttacagctactatactcttgaacccctcacttggcagtattccagtacaggcgtaaataactgcttaaaaatagcttctgtattagacttgtaaggtcttcggggtttctagaactttggaatagcaaacttcccaaaaaaagattcccatctcgtccacatactggccgggcttttcgaggaggcgatcgcatagcgattctatcatcggaggtgttacgttcggtcgtcgacctactcgagctggggtgctctgacatttccgaatcggcgaaggttattactgattttgataattgaacgcttactacattcaacagcttgagctatttgcgaggtagtgagtgatttgcttaatattatacgctatatcatttcgagcttcgagagggagagtcttggcgccatgttggggaaatttagataactagtgaagcctggaaatttaatagtcagcaactccatcttctcacccttgctcacccctctgctcagtgagcaagggaaatgattcctggtgaaatgtctgggaaaggccaggtaataggaaatgcacgtgacctagtgaacttgtaggagcctggcagcacatctcaaagctgcggacctcagaaaagatgattaaacgaaatggcgcatcctccttcggttgatccagtacttctcagaatgtgcactttaattgctgaatcagtgacctccttgagcgatgagggacatatattttatccagaaaatgctggctgattatacgctcgatctgacttttgagatcgggtcgtcctgttcctgggaacgccattacccgccccaacgtggagggagatcgttgcaaaaccgggttgaaagcggtgtggcgagtagaaagcacacttaattcatcttgctgagcacgctagagtcacatgatgacaaggctgagaaaattcccctctttcagttcgttggacacggggcccactgagattctcgtcatgaaccacattacacaaaagctactactcaacgtcttctgctagacgagagagagagagtgtttgaaacattgcgcactatctcgtacgtccgggcattctggttagtcgagcttaccacccaccatggctgagagttccaaatctcagccagagcaatcagtgttaggacagaacaaagctggtaccgacacaccaccatgtcgaaagcgacttcaacatagtgcatatactattggatgggtgtgcgcccttgtaaaggagcaaaccgcagccagagctatgttagatgaagagcacgaacctctcccgatcccttcaaatgatcttaacacatatactcttggctctatacgtggccacaacatcgtcatagcctgcctgcccaatatggaagccaactctgccgcaaccgttgcgacctctatgataaacacttttcttacaatccggttcgggcttatggtagggattggcagcggaattccgtcaaaggtcaatctgggtgatgtggtggtcagccaaccggttgctgactattccggggtagtacaatacgatatggggaggttgggaaggggtgggcagtttgtccacacgggcttgctgaacagacctccaaacgcgctgctcaaagcgttgaaccggctgaaatctgatcatgagatttatggatcacaaatcaatgagtatctagatgatgtggaacggaaatacccgaaactggctccaaaatataccaggtgtgacgagaatggaaaatcatctgagaacgaaaaggagaaaaggaccgaaagagaagtcagggtgcattacggcctgatcgcatccgggaacaaagtggttaaggatgcgcaatcccgagactccctcgataaagcattcggcgggcacttgctatgcgtggagatggaggcagctgggctcatgaatgacttcccgtgtgttgttatacgagggatttgtgactatgcggacctgggaaaagaaaaaggttggcaagaatacgctgcaaccgtggctgctgcgtacgcaaaggaactgttaggatgtctgcatcccagtcttgttgatgccgaggatccaggaaaggctacactagaaaatggtaagtatatacctatccaaatagatcatgtgcaggtgtctaaagctggagtgccaacaaatacccaagacatatgaaacgaatttggaaatatattctgactgcaaatagtgagacaacagatcgaaagggtacagcagacagttatggactctggggactccgactcatccagtgacaacgactcactgttttctgctcctgtctctgtacctagcaccagatcgtttgactcgggaaaaggtgaaatgaattcgttgttgattgagcagtttgcacacttgctgaatgaagacggagatatgctttcgctacttttgatcggcttatcaagagaaccgatcggatttgagaggatgcgaaacaattttcggagactgctgaaacacttcgcgaatgacctcaaggcggatatccttagcgaatcgcaccgagacctagtgagatttgtaagctcatattcagttatgatcactcgtgagctctttgccatggtgtctgtcgacgagcagcgaaagctcaatccttacgaacgcctagcccacgagaggaaagtggaatcctatcttcaaagtctacaggacgccgctcttcagactagtgaagtaatcgaaggacttgatcctgatgatgaggacagtgacgaaggatccgtagcagagggagccaacgaggatgagccgtatgatggatctttgcaaaacctggatcaaatgaagcactttattcgggaaagcgctgcctaccaaattcttcgtcgtcggcttgaagagtttgttcaaccctcactaagctcacagtttcggaatttggtgatcaagtggtcaaaaccagaaaataagaaccatggcgatgttgctcggtataaactgcggaaccttgtcacagatttacagcacgtgaatccctctgagattcgattcgagcatgacgagagcagttctcgattttctatgttcatcagccaatatcagcatttaattgagcgctggaccggagagtcttgggactggtggccgttacctcgctatccgagaccactggccgaatcagagacacggttacggtggaagtgtgtgagtcatcaaattatagacagccctattcaatatagatacagccctaattcaccaaccaggtgtgtggcaaagagcgatgggcagagatgccaaacacccttgtcaaacgcttccagtctataatcagaaggcttcccgttgacagcttggtaacccaaattacgtcgcctcctccaacacacacttctaatccgaacccttgcaatattctaaacagcaatctaatttctaaccaaacttcccatcaagatcatatagtcgagcagccggacggttcaccctccaatccttcacttcgtcctcgaccctcgggactcaaggttaatatcgcggacttgagcatcactcggcaacgcgtcctctttctcgcaaagcaaggcggagattatagactagcacaaatttgcgttagcaatatgacctgtcataccttcttcagcacaatgaaaaaggagtattttcgcctgagaggtgtcttgcgaagctggttcagcgtttggagatactctcattgcgacttttacaaagtaagtactattgcctgtgatcgtaaggtattgttaaaaataaaaatcacagttcgagaagttcgatgaccatgagtttacggtcaggatcaaagattcattccctgaccatgcgaacaccgattacgagtatcaaccaagaccgatggacaacattccgcctatctcagagcacgaattcacgaaacgtttctacgcgtgtcacaaaccaagaccactacttcacctgcaccacgaatgtaggaaaccgggggcacattcctctgaaatcttgcagttcctcccaaagaaaagaactgaactagaagaagcaggcaacaagcgcgaagacttctgggggatttatgcgcgcgaaaaaatcagcttacgttggatcattctatacaattttggctgcgtttcacctttgctagcgttcttcctagcgtggattgtaccccatgggcttggcacagacttacaaaacccatctataccgctttccatgatgattgccatgctttctctgttttggagcttgtatcttagcagtctgcaattcggaaggtcgcattaatttgaatattttgtattcgatgagatattgcctagctcactcagaaagtccccgctctgagcaaagacggccttgcctgaacgtccatttaccgaccactcattagaaaattttgaaatttagagggaaaatccaccacatctgcggcaaccatatgagcatagcctcgtatattcttgaggccgacgagcaccgatcttgatcctgcggattataaccgatttttcaggcaattcctgcttatgccgtaatttcctagaataaacctgtatatatattgatttagtaccattcaagcgcagagcttagctcttaatcatggctatcctcacttaaaagagatcaaataaaacaatgacggaagtggtctactgtgcgagatatctttaggaatgagaggtgtagacttccgcaaaacccaactttcgacccagtttcgacccatctttattcgtaaatatacatacactcaatttaaaagcccgagacacgaataatacaatgtttcaatacaagtcagcatttgaaacgaggctaagcaagattaagattagcgtgtttaaaaggagggtttgagaaagaatccttgtgagcagatggtgaaactaatttcgatccatcctgtacattagaatgagtctagggtttctgcagtctgctttggtgtgtgtagctttcaggtttatatgtcagatcatagggtggcgcatgttcctgcttcctttatcttgagttatcaattgcgtgtgagctctctcgaaggagaaaattttccccatctcggtcggtttgcaagctccgaatttttgaaatgaatgtcttcacctcatcccgggcccttgagcgaagcttaaccacggtgtagagtagtgcctgacgtaatgccgacgactcgatgctgtaagatttgcgcctgcggtcactgctgggatcatatatgcattggcaaagttttgccttacagttcgcgcatggcagcgcaccagaacactgcatcatattagcactggaaggaggaaattcattagcttctaaccttggtccttttctggcgacaatttgtacaagcaagagagacattctgtcgctttccacacgatgaaggtgatgtctgtagttgggagagagaggcctgcaccatcgggcggagcggccgtagggcattttggcctgtcatactaggctaggaactgagggccaaatacgtcagaaaatattattcagtgcatatgctatcgtaaggaggtgggtgatgcgctggattaaatagccaattcgcagtgcccgttctctttgtttacgagatgaaaaaaacacattagcagctccgttaacacaaaggccgaaagctcacggtcattattgagaccagtcccatgcacattcccgagctcggctgtagcgattgaaatgtttatcaaacaaagaaacacggcggtactgattacattgagccctgcccccggcttggcacagatgcatgctttgattggacaacgcctggcagtaactgaatcacctcggtctattccaaagatatcacaccatcggtttgtcgtacagaaaatcatccatttcccttttggacttctgtgttacgttttacgacgtccgatgcaacgatgagaccgtatggctgctataacaatcagagttccgaagctgttgtccaggctagatataaacgaaattcctttgcaaagattagccagctattatgataatgaaggttacaaattaggtgtaactcaccattggaacttacgctatccaatctacactgatggactgcaatattccacctggcagtccttgcacaagtcgctactgtgggactttactccaactttgtgtgtagggatgacctagctggatttgagtccatttcctgatacaatgggccactcgatctgcatgcccctcattcaggataaggcaattgctccgacgcaggtgtatatcgctgatggtactgttacactctcgcatcatactgtgctgaatggtacaatgttataatgaatgcataagttgtgctggaccaaccgccagactcgcacaccgggtacgggatacaagaaacctattctgttgatattatattcgttcgtatagtcgcgagcttcgtcaggcttgtgaattgaaaagaagatcttatggtctccaaagcaagcacgacgatggagagaacagtacatcaaccaacgtttatgcggcttgcgccatattatgagctaggactgataacatgcaaggacgtgtggggcaatgtatatagcagttacgatttccactgcaacgatggttctcctttcctggggcacccaggcagcgacttcccgagaattacctaatgtgtatttaggtttctaagggtttgggatgaggcgtatacagccgccggcgagactttgttggttttagcggcgggtcgtcaccatttgacggctgttgatccatacattgcttgactttcgagatctcagcatctagcgacaagactttctagtttatcttaactgtttccaatcgatgatagatatggcctcggctcagccataagaattcgacccctcccgacctccacctctattgagttgctactttgcaatttcagtgatcttcctctaacgatatcttcctttacatagagcaattttctatatctaagaaacgggccaggactaccctcattagacaatccctcaccctcttcttgcaatttccgagattcctgacaggtgatgtctaacgggataatcccagtcagcaagtacgctagtaagtcgttcgcgagaagattccaatgcctgctcaaaaaagtgcagttgagattgctgcttgtcgtggagaatctgaaggctgtctctctcatgtttcaggtgcacaccagcctccttcaatatctgattgttttgctctagcttctctccatcgaagtgcttatacacgcacgactcccacacgcgtcgatagagcccaacaagtcgagctgctggaaaggtgaagttcgaattgtcacgttcgaggtctgctagcaccttcaatacgggttgaagaggttcggtcgccaagatacgtcttgtttctgcttcctgctgcgaaggggagagctgcaacagttagagatagcattccaagccactcgtgtcacgcactgatagatagacatgatcagaagcttcctgtgaattgcctttgtcattgagggttggcaattcactgatctgctgatctccctccttttcctggcttagcgagctgtttggggtatccattttgccctcgagacaaagcaaaggggctggacagtaccatttctctcaatccctggtgtctcttatagagtatgcagacggagtgactacgtgctgagttttacaatcaccacaatagtcaatcaacacagctggactttcactagaatgtattttatttttcaacaagctgtttacagtccatgcgaggattatgatattgatcaacgagttagtagtggtaatctgacgaaacctcatggccttgaaatccagattcatggactttatggactttggccaatttggtcagctatcaacggttgttaaacgccagtagagctatacgttgatcatatcacaatgggtcttttataggtatcattcaacgtctttatttactgtttgattaatcagtcaaaaaagaaatgataagtatacagatatcttcactgctgacatgggatgccattggagctagaagtgtttcactggttcattgatcaagaccatgatattgaaacccgacccttcttccccattcgttaaaagtacttgaaacccatccagcagataaaacatcatggaaataatagtgctactgtataaagatacgaacaactaaatttgaatgatgattatacgtttaagatactaagttgatgcacggctgagtttaacgtggttcgagcaagggcgggcacctgtaagcgacggtgacctaacgtgccgtaggtaaacggacaaatccacagctcaatacaaccaatagaaaaccgcggccgggaagactagcctgtgtctcctagtaaacaaatcggaggccggtttggtgattcgaagtgatagttgattgaacatcatggctgattgaatagccataacaccgcaaggcctcattttagagcgctataacgggttaataccagtcaacgttccttacaggaaccgactaagcatcactatccctcagcataacccttacttggctctttcgctaggcataaaacttggcatcaaaaatggcatcatgacagtcacaacaaatagtggctataagaataagatatgaatttcaacagaccctacatagaaaaggcaatgtgcccttaagagctctctaccaagcaaagcagtgaagtaataaggcaagccgagaagttctggatacgtcctctgccccgctctgcaatttattcacttgactacgccaaagtcaagcaggcttcgcatctgaattacttaataagttctcccttttaatccagagctgggatttccacttgactgacattcatggaatacagtgaggacagcatgttcgacagtgaccatgagagaagtgattcgtagtcgatccactgtaccaccaatgtcagccgatcaaagagatatgccttgccttggctggttagtgtccatgtaacctgtcgaagagccaccgttatttccctctctagatacgtccctaagggaaaagcgcgaatcatcatgttacgggaaaataaacctcagcccgatctatctgaaattctactgatcctagaggcgatgtgatttttcctggtccacgcggattcaacgacaatatacgagcgcaaaaaccacgaggctatttcccgtatcttcgtccctggtttatggcaggcatatacaacgcgcgctctattgcgtcttccgtcctcactctcaccgccctcacacaatgaacggcggagctgaacctcagaccgtccgcatcgcaaaacattcatccaccataggacaatttaactgtcacaactgggctggccacacttctactaagtcggtcaatcggccggtcacctagcctgcagatttcaagggacagccggagtttgcgatgagcttgtatacgatatggcacgaatgatgactactttgagatcttttcaaaagctatactaactcgtctactaggatcaatacttactgactaggatcctataacaaaagaacaccctcattattttgtcctcgagtcgaatgcgaagcgaacaaatgtcttgtctgctagagattccctataccaatacgatcgcggcccgcttcccatgctggaccgaatcgctgccgaattgatcgacggtcgagggactgcgaacctgggaccgcaacccttccagtcgatcctttgcctggttgtcattgtacggagggactggcttgctgcgcccaaccacctgcactgggaccggcgggggactgccgacctgcgattggagcttctctgattcgggactggattcctgctcactggatatatcgggtttggtatggtcatgccgtgccatatcgacatgccatcgatcgccgcggtctgcgtggcctgggaactgcttctctggtatcgtgcatcgactcatcactgaattcctccgtgctgggctcgctgctcgtgttagtggctcccatgtccgcgacaccgtcaccggacggactgcccatttcctcttcactggcctgccaattgggctgacacccatcacacatctgttcagccttcccatgatcaccgcaatggcttcgccggtaaccgtaccatctaaatacccatccaatatgtatcttcgacaccgcggatgctccgcctccatatactgctggatgcgtcgtaactcatcctcgcccgtatcttgcgtgatatattccggtgcttcggtatccgcgggctggatgatcatcgccttgctgctttgcccatcacggcccggacgaccactctcctgcgcgtaatctatcaacgtgcgcggctgcctaacatgaatgatacaacggatgtcgggaatatccacacccatacccaatgcattggtagctacgattacgggcgactgcccactctggaacgcatccaacaccgtggctttgtcgacctgccgactgtggtaaacccggcaccccaatcgactggccaatatctccccggttcggaccaccggcgtatacacaatgaccttaccgggtcgactccgatggatgcggtcctagataatggctaataccggtggcgcctcgacccaacagatctcaaatcgatattccagacctacgatccgacgtaccatgcggtatgccacattgctacggtacgtaccggtgcggaacaactgcactttctcgcgcgtggtctccatccgcataaacaccctgtccacttcacgcggcggcaaggtcgccgtgacataccatctgcacgccgaacccactcaatcgacccagctgggccatcaccgaccggaaatccttctggtcgttcaacatcacgtggtactcgttgatatcgattcgctccaaccggtgctgcatacgctaccggttcaaaaaacccagatgatagggttgtccgcggtaagacattgcactcatttctgacactttcatctctggactattcacgcaggatgtacggtatcgtcaagaacatggattcgaatataaaggcatcaaaccggcgatacaagttttttcccgggggagaccacgaccgtacatggcaataattccattctccatctcgggtaagtatacattacctagtagagccacggtccgattatagaatccataattgccctaacccgagaccgtttattttatttttcttgttgtcttatctttctagaatcaaaataagaagaaatggattagtccaaccttgtccgcgcggacgagattagactgaatcggaaaagcgtgcagcgctttgacccgctctgactttgaagacagtcaattgtgtgcggccaacgcaaccaacgggcaatggcggagacctatactgattggcgttttctagcaatagtagcatttgcattgcgcggcgttgcgtcctctctgtcggaaaacataatgtaggggggagaaatcaaaagttttcatgtataatttagatgaggatagcgattggctactcagctagaaatagtttcatgatccctgttagccgaacgatggtctctatatgaagccgtcaaatccctgagcgcgctgggggatggttgttcttctgtataaaaataggttgcgtttatgagagcgtagaacagacagccgttaatacccgctgattgggtacgaaattgcacatgcaaaacataatttattatagtctgaaataaatcatattggtatttttcgccacaaccactctgttgctgatcacttagtcatagaatggaccgctaggaattgttttctagaattcagccctggaaatctcgctactgattcggcgaagtcatatgcagggtcttcacggtgtatcccacctttgtaaaccccttactctgtgataccaacgaggtaaagatacatttctccatgatgcttttgagtcgtagaacaattctggtcgcggaaatccaagcatgcatatcataggaggctaggcaacatagttttgatctcacgtaatatcatatatcgatcaaattgcgggctggaagagacctaggtggcaacatataagtgtcatggcatgactgccttccaaggtccaaaatcttttcccatactcagctatgtcgattgcaagaagcaacgccggtacctctttcaggtaccagtccattcccgagcggatcaatggggccactgtccatattcctctcgaccgtctggaaaaactgtatcccgacattcaacgcttcgcagctatggctgtcgtgttttccttccaccccaagagcccactcacgccaagagttttattgatcaagcgaaacggcaacgaaggctcatggggtaatacctgggagccaggaggaggaactccagatgaagaggacccgactatcctccattccgcggcccgagaaagcatggaggagacgcaaatctggcctttaagatttgctagcaatgctttcacgtgttctttctatcacagagatagaaagaccggcaatcaagtcctcatgcgccctctcggattcatcgccatcgaccatgaagtgacgcgagacaacggagagacgatcaaaaacgaaaagacgatggcgcaacgaatctggtccagcgggattcaacagccgctcggccaaagttctgtcaagatcagtgatgagcaccttgatcattgctggttcactgaggacgaggttcgcagcgctgctccatacgagcaagacactccacagggtccatttgctatgcttacggccaaaagggacatggttctacttgcctttcagttgttcagtcaatcccaaggccatagtttgccaccttcaatagatatagcacgctaggacatggcggcaaaggggaacttggcaaattgaatgagtctcttaggagccctcaaatgatggccacacagagaaagttcggtactttatttttggagagcattagagcggtaaattaccgttagcaaggactattgcagagaaattcactgtcccgtttcggaggaacccttccgaactcaagcagctttccatgttatgtccgttaattgtctcacgtaactcggtaactcatacaaaatattattactccatttggtcatagagttttatctctcaagagagcccatcttggaagcaaacgaacatctcacagattagacaatacgtcctggccatatatgtatgcacaaagctacactaggttgcctttctgttcgaatatgctcgtttttatcatggtcaagtaattgctcttatgctatatgcccatccgcacagttttgccaacatggaatctatacttacctccattgaatgcagtgcgagagctagctatgtaccctgtcatatgagcatgcctcaagcccttgaacagtatttagaaagccgtagctctgtgcttaaatgataagtcgacagcaaaacggcagtcctagctgatatgtacagatactgcaaggtcaagagctaagtactctaggagcgggagcggctctcctggagcgaactgtggtacatgcttaccacacgccgcactaaaactttctgaaagctcttataaggtaccatggtccccacacaattcctataccgttcaatctttcaaattaacttattattactactctcaacggttgacgcgagaaagcaaacggtgcttatgcccgataggtcctcggaggaattcgatatctgcacggtcacgggagagcactcgctactttcagtgtcgatactattctacttacggaactcggtggcgtcagaattggtaagtagatatctgagtataactagcgggccatattagcatgagattctgatggttggccatatcgcagtgggagtggagcatagttgccaaatcaatgcagccgagatggacgcagccactacaaagctgttttccttggctgaggtggtggagaggctgatcatgaagaatcctctacgatatcatagagcaccgagaaaggtgtaattcaccggaaaagctgctacgcgtcagccttgacctgccagccttctacgtcatatactcatcaatcagagcaaattgttcgagtaatgaagagatgagagcgaaatgaagatactggtgaatgcgaccaacaaaattactcaccataatctagagtcatataatcgtggtgatgcgtaaatgcggcgagaatccgtatcgtttggctggtgagaagacacgattgaaggtactatacgttttagactgcagatggtacagaatttggaggtaatccgtagccccatttgagataaattgcaggggctttgaaatacagctgtatattgtattacactaacgaagtggttgtcactaaacacagagacaaaatggttgaagataatcggacatgggcaaatctcacccgctttgtccgtaggaagagctgccctcgcatatcgatttcccaccagagcactgtttgaccctcgcggtttggaagatcgatcttgacactagggtgttgaaggagctggttcaaaacagcaggtgactctttcaccacactgtaccacagagcactctcgccatttgtgttcctccaattcacgtgcaaatcttttttacgcaacaaaatattggtaaccagctccgagccataattcgcggccgtcatgagggagagaaaccatcgtgcagcgcattcacatcggcccggtaagaaagcaaggtctttgcaaagtcgcaattgttgtttagcggcccagtgaagcgcagagctgttttggtacctgatattatattcgatcagggctaggcgtagcttgggatagaggattgagtttgtccgagcaagagcagaaatgtcgcctccctctagggtgcttgctatgatccaaagggtttctgttgggcagtcgagaatggaaatctgctcaattttgtcaggattcggaaggctcatctcatttcggctgttcataccatgattttgggcgatggatttcagtggaaagggagacacaacgtgctgctcagatgcttcttatcggtttcaaggtgacggtaataaatggatgaaagtaatgtgactaagttaagcgtttttgaatcaagaacctggcaaaggcgagatacgtgggaggggagaagcttaaccaacacttgcggtcaccggccaagcatcagtttccccctacctgccgacgtagcaatcgactagcggtcctaggaacgctgcctaagtttcttggattgtgtctcggttctataaagaccaagtttatatgagatggactttatgagggtgcgagaattgggaatctacgacatataaaagaagatctagacttagcccagtaaaactgaaagaacagcaccaaatgacatgatctaggtactgtaacggttgccaatctactgaagaccaattagttgaaggtttcgtacagctgggataaaagctattggtacagagacctcggagcgtctcaaccatatcctccggcatgccagtcttcagaccccgacacagatcatatctctacacatcccgtttgcttcatgtatatccctaacagcagcggaggaaactcccaggatgaacaatgcacctcctaggatacgcttcttatttcctacatatcgagaaacttctctattagggcctgattatgttagtaggtcagcgacctcacattgtgccttttcggccagctggcgtatggtacagcccaagcaccaacgattcgtcacagctctacgaggaatcctcagcgctttaccatgatcttatcagaatagagtcggtaccgcggagaacattttgattgctcctagaacaagagaagcatatcctgggagcttgtcttggatccacaattcgactgtagcaaatgaagaatctggcggcatatttgatgtggaatgattgatgaggccagcagatatcataagtagtgttccttctccatctaaacccccactagtacacgtatcgctgtccgtgatttcgaacatacagccagtacactcaacctactttacagtacccactatcgcaccgctcacaagcaccgcggattatctaccatctgctgtttcactacttttgaatagtggctatacattttgtataagaggcctagatcaacagtgtgacttcttcaattcctccactatgtctcttcgcccctgtcagccatgccgcagatcaaagattcgatgcaaccgtgaagttcctcattgtcaagcttgcgtcaagcgtggtagatcctcgttgtgtgtctatgaaatgagagtgtcagaccaggaacctgctcttccagagcctcattcaaagcggcaaaagaaagagcatagacgagcatctggcgagtatcaatttgaatggagagcttttgagccaggatacgaacggtcttttcggtacgaaacgagtacgaatgagaagatacaacaaatcgagcctgaaaaggaagcaaatatcaatcacttgcatcaaagtcattttgacaggggcgatatgacaccacacgagacgtcaccaaagagtattacagctacaacagcggacaaggattgggtttctcggccagagtatcgtgtggcagctgtggatgatattctcgaacggccacagagaatattaacatatcaaccaacaccgcgttatgcggagatgacccctccggtaatcaattgcaatctacgaggaaatttgagaccacaaggctgactctcaaaaaggcttctttgccaccacggccgaattttgatatgacgatatctgaaagacacaataatgacctacatacaacccaccaactattgttggtattgagctacctttttatctcttcaatgcttcctacggatgtaggggctttgtggaaggtcatatgccgatacggccatgactgggaagagagcttcgtcttgcagcgcagtcagcttcaaagttggctggtcagtgcccgcaaaattttgaccaactccgacgggctacacactatatctttggaagacatagaactccaaataagatacattctgtttatccttgggcaggaggcatcgccccactcgagctttctagccgaatgcttccaaagcgagtaccctccataccggccgtttggggtgagggcaagcgtcgcgttgatttgtcatgcctttgagggcatccggaccgatgaacttgagggatatgaatcgaaggaaatttggtctcgcgaccagaactttctgtcagtgatggcttcccgtctcaaggagtcgccactgtttgggcctgaaatttcaatgccccatctaaagtctatgataataagtcttcagagggctttccagtgtgaagaaatccgcgtgtccagcatgaattgtcggactctgaggatccagagccagttcgaagtattggggtattatagacgggcattcctagcttttgacccgatgctattgccaaaaattatggcttcattgaccgaaactaatgatattactaacctatctggccagcaccagcttacaaatatggagaggagcttggacagaagtaagtaaatctctgtttagattgatatggtgtttgacaatagtatagccaatttggccttgcgtctggccaacattatcatatccctcacgacagagcgcttggacgcagctttccgagatatccgcgagattcaggagtcaaaagcggatcaagtcgttgccatggagatgatgcacgtaaagtcattcgaagaagcatgcaattcgaacaggatccgtaagtcttagtatttcgaattggaacaggagaaatccctaatcgttgcagaacccaccattgaacccaccattgtccgtgttttccatgtttgaccgtgaaattacgagcggatttcggaatccgagtatgtctcttctgaaaagtccgagcgttgtatactaagaaaattgaaaattttgtaattggaaagagtatggaagccctacgcgctggaaacgagatgatcaacatggtttctagagatcaaaatgcaattgtttctcagtataggactagatccgattcttgatctgcgccgatgaatccttaattcgttcacataagagtcctatggtcgcaaagagcctccagcattagcggcgtgatactgtgcggtcggcctgctccaatagagggggccctggtatcaccgaactgtcgcaggttgctgcggatggtggtgacggaacgcgggctgcattctgcggcagcagcgatctaggccgtagtcagtgatttgctcaagatcatatcgcggatgaattctcgggtagaggggggtagatttggagccatattgggtcgtaggtgttcgtctcgaggtggtgaggaagggggtcaaggtggtaagttgcgacagctgcgaatattgtctcattaacgcttcggtgtattggtcttgtcaggtactttaggtttctattctaacgatctgcagtctagctagattgagactaggcagtttcaccatcgacctggcgttagggtctgggaaagttcctctatgtaatatggagtgtggcttcgaaggatgtctgaaagccatggacacggctggcaatccaaccccctaaggaatacagacagagtttgccttggtcatttgcggtacctcgcttttttctactcgaacatattctttgctactgatcgaaaactactgaactactgtaccgcacacttccataggaggacaaattcccgtgttttctgctgtttctgttaagcttactttattttttttgccagctagcttagggtctgcttccaatcatagggcaacccttactgttcgttgaaccaaggcagccgatgaagaatagatttcgaactgtgaaatgcaaccaatcatgctagtgagtaggtaactaacatgactcaagtagatattttctatgggcgtaaaacacagatgctgttggtgttcagtggtttttatgttcaatgttgacataaacgttgacatcaactttctaacaccaatcaccacccgtacatcgccaaagatggttatctgagaatactcagtgaatgtatcagcacgatactaccaatctatcggggacgaggccaaaggccccggtgctcctggaagcacaagcaagactccgccagccatctttcctactgtagcttgtcgcgcggctgaatcacccgcaatggcaacccccgagatatcggaaatgcacctacctcatgtttctattcatgaccaacccaaatctggcccccaaattgctcccgggaatgcgctttaaatcaattcgtgaatcaggcagcacgtggatactgtaactggattgaatcatcgttgattcaaatgacgcattggtctacgtaccgtggttgaggcaacaaatcaacatccgcagtcctcctgggagccggcactgattggtaacccgcgaaaacttgatagtggggatatctttcatggtggacatcaaacatagaaaagctcacgattatcctatggtggatgctattatgccttctttgctccaacaagttgctagggctgcgcatcatggatcacgagctgtcacacgtatcaaagaggtccaataccccagacacagaagaacataatggacttacatggcaaaccggtatcgttatcttagatccctttcttgaggaatccatcggctgacaatccatctccatggaggcaatgaatcggctgaaaacttccgtcaggtcgtcgaccagattgtccacggaaattgcgaccacacacgccaggttttacagccgtcttttaaccagtccactggctctatatccacagaggtagccacttctgttgctagctcgaggggctgtatgataccccaaagcgccataaaggctgaaagccaagccctacccccactgaacgcgggaaagagagtagcggacttcccaaccttcccacaagagcaacgtcaacgctcgtcctccgcctctgaaatacacggcggctcacaacgggcgacccaagaaatgcatcgaaagacatccctaaccacaacaattggtagaaaattgattatcgatacaatccaatacctacaaacgatatccgaccgcatcttgatctccgacaccatcccctgtacggagtgggccacgatgcatctcgccatgcaatttctacagagcaggtacgaagatatcattgcgggggaagagatggaatcaaacgctgtgtccgaatctactttcccaccgacacagccagaagagaagtgccggaagtgtactgctgcggatgaggagaagctatatgattgagaagctggctataatttgctaatacagacttctatttaccaaggtgccatttccatcattttgatgattctagtagaagagatagactcgcaagaaataggaataggatttcacaatgatcgcgtcggaaaaagcaaaaggaaattttcttttgaggtacataaacaacagtagattttactatctacagggttatcgttcaatttcttttgggaagatgtagtatatttggcaaaatggagaagtatcaattcgaaataaaagcatgctatctatcggtctatgtctatcagcaatcagtctaaacattctatcgatctaaaaattcaaacacaatttagcgtagaactcgaaggaaataaaacaccgttcagtacgccgcaactgctgtttctgcctctgggagaattgagcctacaactggaccttgggctcttctagtcgccgcaactgtgtcctggtacacgtgatacaaagcttcggctatcgttttctgtatcgctcttgtgcgttcatccatattgtgccaaccctcttcttctgccctttcagcaatgaaatgttctttgttgagtatggcactcccgccgatcgagagcttgggtccggcctggggattgacggtcgattcccgactaataccagaggaagccgaagtgtaatgggtctcatctcggtcaatgttgatcggattggatagcgacccctgtcccgggtgcacatgtgcattggatggtggactttgatgttgtcgcggcgggaagatttgtatcgcaggtgcactgaggtgcgaagcaccctgtcgctcaggcgactgcctcgctgctgagcccagtgggaaaggggtgggggaccgatcttcggtgcgcctttcggcgcctccagagtcgctctgtagcacgcgctgatagcgttcttcttgtttattccagacttctttgatctttgcatatgcggcgcgcttgcccttgcagaaacgaatgaaactagatatagggatccaagaacaagaattttgcattttttgggtatcttcgactcttaggtccctccatttgatcttcagccaagtgcatggatcagacatgtatattttattcgggtctctttcttccgaggcaatcccgtagatcccgaccacattgtgttttgtataccgccaacttctgttccctggtccggttttgagcagggaaatgcgcaaagttgggtcggaaatgttgttcattccgtcattggtatatccgtttctatacttgactttgtatctggctccgtggcgaggtccgtattggaggatgacgaaggttgatcttcgtagtgttccccatccatctacaatcgcatcggtttcctcgtcatcgtctgatggatcaaggctcgctagaagttctgggtcttggagctcgtcatcacttcgaaaattcggtgacaggctagtttgattccgtgaatagctggtcatggaagggtgttgatgcccactcaagcttgatccggtttcagtctggtttgccaagccagtgtcaggcatcggagtatcatctctatcgctcggagtggcatccctctcgatagactgtatcactgaatcattcgatgggggcgaaagccttgccgtgtcagttgggtcactgtcactaggagcgtaatcgtatgcttcagacgagccatctgttgggtggtgcccttgtggaacagacttctgtacagccccactagcaactttttgaggagagatagtgttgttgtttgccccttcctctaattcaatgagacgagataatatctctttgtccttgtgggatgaggtttttctaactccactgtttgaagccatattgagagagcaggcctggatgtttccgtgaagagtgcaggcttttcgcggtagatggtgtctatttatgaatttccgatatcaagtcatctgtatggatgtaggaccaggttatcgactgtggcgtacaagtaaatgcgttgtcctctgattttattttctgtatttccgttatgaagatcaagtgagcaccaatttacgttctagctcgttgggatcctccctcagaatacagagactagatgacgcactttatgtggttctgatgagttctatagctcagagtttgagtatgctctcctttcgtaactacctcgaggttcaattttggacccgccactcatccgggcttcaaatcaagcccgcattttggtgagcaagagaataatcaatatatgaagactctagtctcatttttcctcatgagaacgttatttgcgacgatgtgtagcagggtgtcgctcgacaaacgcaaatatattgacctcaggaaccgattgattatattggtcaggtttcatattaaaggaccgcattaagccaatgaattctcgcaagatacaaattctacttgtgtttcttcgcccgcaggagattaggctcagacagtgtcaggtcatgtatctcgatcctgaaaatctgccctctttactattactgacttggccagaactctatgtagcagctcacatagatgctttttgctcttgagcaaaaatgacttcatataatatcctctagccgatcttcaatctactgaccataaatagttgctgtgtggatgtctcattgtccattaaacatttcgaggctcggaccaattttatcggatgattgggatcaatgatgaatattgaatgagagatattgcgagggaatggggtatacgcagttagggtatcttacgtacgcactggcaaaactggctaattcccaagaggagcacgttttggatgatctttgtgaggataggactcaggtatttgagcagaaagagggggattcataaaggcggttgacctgatatttatgctctttttatgtttcacctatgtcttagccttgaaataaatcatgctggcaccaggaacaacaacaacccgagaacgtcaacgttcattaataaatagcttcaacggtatccagatcatgcgcaataatatgaatggttactcaacacatttggctacgcaacgtctcaatatggctacttgaactaaatcccattacactcaattaatggcatgattaaagagcttggtctgttaacacaacttccaccactgtatgtcatatgcgtatgtagctccatatagctattatattgaacaaatatttgatctttccgggaatcacagcatattgatctggggaatcgattaaccaaaacttgacatatcaaattcctcaagacataccctgtcaataagcttgtttgctaacaacatccaacaccaggtgggtaagttcgtgtgttttgctgtagcattgttttgggcattcgatgcgatcgcaggacactacaggcattctggcagtctctagcttaacactgccccataatcttcgtgcaagccttcaataatccactgctgctcttcagcctatcatagatactctgttctcataagtacatagtcgaaggggagttgttttagtttacggcttctcggcgctcaataactcttacagcaaatttttgtttcacggggttataacagtcccctacttgtaggccatcaggttattcaccaagcactatagcgctcaactcgaatatttgagttttggtttactcctttcaccaattcggccaaaaggaccgttgcttcgctcattgccctaacgttagtggaagagagctgcgacccctatatagtaaccacatttctacgatagtgcttaaattgccgttctcgtcgtcatccataacgtgaagtaacagacgaccacggtcccttcacgtaaagaaaacattatttcccttttgcccaccaaaggctcaaagttctaaaaatcaacctttcgcatttttattttagcacctgttttcattggacttctcttgccaatcagccttacaagcgccaccttcagcctagcatctgtcaaaggctatcacttcctcagagcaaggcatcaacttacaatggctgttttgaaaaccacccgatccaagaattcatcgacgaggaaattgatgcgccaaaaacagtgtcgtcgtaagacaaatatgctgaaaaaggcatctgaatatagcaagatgtgtgatgcagatgtatgcgtaggtattcgcatgcgggaaaccggtcaggtgtatatcttgtcggcggatgcttcgggcttttgggcttttcttactttgcaattggtaagtaaactatatggcatcatctccaggcggagcgctaacttcccagagctcttattacccgactccgactgtgatgacagatcgtgatttgtagaaaaccagggaggagatagttttcagggagcagtgataggctctttatgctgtatactagagtatgcaaatgtattacaatccgtcttgcagtatgtttttgcccatagtcctttttgtgaaaaacagttgttgcttttccattcactctcgtagttggtatgtcgaaaagtacagtgtccaaccaaataccacagtagtctacaatatcattgcgggcttcatgaataaagcaggaagaagatcgaagcttgaccgggaagagccgccaaattgcggcagggaaaggaagatcagccgccctgtactgaaccatatcatgagatatacaccttacagtacacacagttggcgatcgtctgattctgcagtcacgtgatgagcgcagaattggggttcaacgttgaacgtaaacttcagcagacgcatgttttgcaacagagatatggtattttactgctggtaattcttcgatgggtactcgatgatgatcattcctaatcatcaagcttataactcagcccagagagccgtaagattcctttccatctttctcgccagcaatgatcaccgaatcaacatcctaagctgctttcgaccgcccaaataaaatctctagtcaacgttgtccgaacagccatttaggaaatgagatattaactcgctaatgtccagtattgcctatcctaagcatgtcccgccctgtttcaaagtttgccgaatggcttgccagagcttccatccaagacaaattcggtctgtgtgggctccttgcccttgtatgctggatatgctgtagcctcggacgcagattcagtcatttgcctttgaggttgcagcaaatatcctggagaagtttcttccaggcgccaacaccaggcgtgctccagtggctagatatcccatcatacttgcaagggggggtgcttgcagtcctactgattgccaacattattacaatcagccttcatgctcacacctgggtggatgtacagaagcgagccggatgcttggcggtcacacatcttattcccctctgctccgggttcagcttcagtcttccggcccacgtctactatgttgagcgggtcaccttccaatgggcccatcggtggctaggccgcctttgcgtgctgcattgccttcttcatgggtccatcttaggagtaaatgctcgcaatacaagccttggagctcccctcgccatcccactcctggtacgtgaagcgggtctgaggacggcggccttcctactcccccgcagtatgtctgactagaagtggctcacaatgaacaggccggatgtagtctcgtctcgatattgccttggacgttggctgcgatcctccgccggtggccgcaattcggcctcaaggtccaccatatccttgcttcgatcgccaccggcgcccttttctaccatttgatcgaccggggatcgtcctaccgttgggttttacttggtggtatctgcgccggatgtgcctggagtgtcgggacatgcctgcatactatgtggttccacaggtcgtggcgcatcacctctagacgggcactcgcgcggtctttcaaccagctcttatggcttgatattgtggttcccatggggtgggaggctcaaccggggcagtatgtacagctctggttgccacgcttaggagtgaggtccttcttgcagcttcctgcattctacgtggcttcggcggacacagtgcagaacgcgtcgggagcaccggccactcgcacattacgcatagtgacccgaccccgaccgggcgtgactggaagggtcgcacaagctgcggatcatgcgacgtacttgacgattcattttccggtctgcgtgctgggtccgtacgggcatccacctaaccttggccagtacgggaccgtcgtctttgtacttgaagacattggactcttccgcgcgttgccattcatacgacatctcgttcaagaaagccgaagccggagaaacacggtgcgaaggctagaagtcctatggcaagttgggctgaaacatttcagtgggtttccccccgttcttctcagatgctttgcggtgtggtgtacttaccggaatagaccatccccattgggtgggggatgaaatctcgcaaatcctcgaactcgaccgtatgtttgatcggaacgattgtcccgagcatagacaccgagatggccggggatttgatgtgagtgaagtctcccttctgcggtaactcttacaattgatcgggctaacttggtggcagatcctgcaattcactacacatatcctagacactcagcccgtggaccagattcgataccgcaaccgtacgcgcttaaagtaccattttcatgccatcaatattgccaaggaactgccacgccttatggatggtacgggcggaacgaccgcggtttcgggtatgagcgctccgtcgtttaccccttgatgatgccaacactaacgggtattagtatgcgcaagcaagccgacacgcgcagcagtacgccgcgtcgttcagcccagaacgagtggtaattgtcggttatttgacctgggtctagaaccctcctgcaagtgggcagacggtgactctttcgcccaagacacatccgaaacaattacagcgccaacagaaccctccaatactggcagagtatttgagcccgattggacaccgagtgccatacccgttgcacatgctgttgttaagcaagctacccggccgtccgggggaacctcggtggatcatagacgatcttgccagagtgataatccggcggttggagggcagagcgctaatcacaaaaggtgggtccagcagaaaatcaccgaaggcggcgtctaggctagccaggtatagttatagaaacaaagaagcctgcactggacagaggaccaaagtatacttttgcgagaaccaggaggatttttagcctatcaatctggttgccgaagtctgcgtgacattcgaatccccacctggcccaaccgtaccttctacgcaataaagacccgttccatctgcatttgacgaccgtcagatctaggtttgtagatcatgcctggacctttgcaaatcctcacgatttcttctcctagccacagagccgtaccagcgtcggaccacacccatgcgcgttgttttactgctgcttcttgcgtccgggtaacatcagagtgtgacagtagcgccatactctcgcgaggggagtgacgatcgacgagaagccagatcatgaggcttgatagctgcaatcttcatatggctgtccatccagtctcccccgaaggaatcacaagtatcgtcccgggtttggggctatattcatcgcgtttgtgccgccaggaggtcgaaatgttattgactacaaggaaacacaaacggcactttctagcactcgagcagtatagcgctagcaaatctacatgataaatcaagaggtggtctcgttggcaaaacggatcatccacgggcaaaatcgagtgtgaccggaccagagtgatacatatgaaaggagccgcagcctaggaaaattcatgattttggtccttatactctgatatatcagtgtccctcgcttgtcagtaggatttgagaggttctatggtcacggttgtcgctgccttgagccccgcgacgtggaagctactttacaggatgattcgcgttaagagtattctacgcgggggatgctgtaagaacaaggcctctagcaatttatagtctcgtattccgaagaacttatcattagaaggatctaatggaatttagatagatctcgcaaattcaatcatcaagatcgtagcattaacaactgaaagttcttcctcatcgggtgctgtattccccttccttgtactgtggtgttttatgatccgatggagttcctccgccgccattgattgcggtatcagccattaaggtatagagtagccagggatataagtgttacggtgagcgttgtggtgagtgctgtggtgagtgtggtgagtgtggtgagtgtggtgagtgtggtgagtgtggtgagtgtggtgagtgtggtgagtgtggtgagtgtggtgagtgtggtgagtgtggtgagtgtggtgagtgtggtgagtgtggtgagtgtggtgagtgtggtgagtgtggtgagtgtggtgagtgtggtgagtgtggtgagtgtggtgagtgtggtgagtgtggtgagtgtggtgagtgtggtgagtgtggtgagtgtggtgagtgtggtgagtgttgtggtgagtgttgtggtgagtgttgtggtgagtgttgagatacgctgttgtggtgagtgctgtggtgagtgctgtggtgagtgctgtattgagtgctgtgatgagtgctgtggtgagtgctgtggtgagtgctgtggtgagtgctgtggtgagtgcgtgagtggtcggtgaaggagaatacctcacggcgggaatcggaatccatcgaattatgtaagtttcttaaacagggcgttcaactttggaaatctatccggttaattacgtcgtcatcaactgtcatctgccagcaataaccactaatgtggtaggtaattgattagaatgaaggtgtatccttctatatagtgtattggatatgtcatttccgtaatagttctatccattcgataggtagacagtatattgtgtgagaattcgtaggttcaataagttttgcgattatatatatacacttgatgcgcgaggattaactgctttcatgtatcttgaatcacaattcaatttataaattctcccttattgatttccacttaagccgaatatattcattatatataattttagtcaaatcatttgaatatatgtcattctctgacatttacgtggttaaaaaattcaaaagtagtatcggcaagctgatcgaatgttgaaatgggaccgccaatttgtagcgcctcttggcacggaggaatatattaatccgaattccgagagatcatggcgcttacttagcgagtagtttttgtctagtttttcgctatgcttttggctcaaaaaaccgtggtccactacatattcaaaaaccgccattgcacttttgcgcttttgcgcttttgcggttttcgcactttcataacgtttgacgttctttaaaagctactccctagccaacaagtctataactataagagcactcacttccttatttcttaattctacattccagcaagtctatttctagagtcccgaggcatatttcaggctacaaactagcagatggcgactacaggccctcgttcaaatggctcttcttcgaaaagaaaatcaatgcgtcaaaaacaaggtcgtcgcaaatccaatttgataaaaaaggcacgcgaatatagtaggttgtgtgaagcagacgtctgcgtcgggattcgccttcggagaacgggccaagtgtttatcctatcggcggatgtctcgggattttggggatttcttgggtcacaactagtatgcaggcagaaacgagtcatatgaccaaggctaacttttctaggcctcttattatccgaccccattttttaatcacagatcaagacctggagaatgccgaagaaggcattataaggaaaccaagcgaggcaaatcttctagcttgaatactataattgaaattaattccccgggtgtgtcttgccaagactggcttgagtgcccaggggcatgtgatctcatttcaatatgattcgtgacaatgcaccgaatattgcgaatgctattgccaaagttgttcaagaggagaaagatgcctctattctaaggtcacaaactcagcacaaaaatcgtcaaagagttggggctcgggatattagcgctccaggcccttctatgaagctcttccttccctttcctagcatttggggcagaaaagtggaggggtgcagactaccaccgaatcgaaggccactgcggggacccactacagcgtgagtatctggctgagaactgtcgtgcgcatttcctggtcgcctctagactatcttaagactgggttaagcctagaacgattggactaggagagaagtagtttacccgtgtactgagtctcttgatttaccagttactgcctagtgacttttaaagattatcagcacaagctaaaagtgtatgaactggtatgcattcaggacaaatgagactaagcggaaccaattcaggatgaaaggattaattgactgaacaggaagacatgcaatctagggcatgttgaattacccttgggccatacgctgataatcggtagcaacaacaccatattctcaactagcccaaaatgactgtatgggaaagttgctagcggtaagttaccgcttcaatgctctgacaaccatcgaactgcgaaaataaagtgctgggttttcgtgtggccatcatttgagggctcctaagcaactcatcctgtttgccaagttccccctgcattgtcgccacgtcctagcgcactatatctattgaaggtggcaaattctggccttgtgattgtctgaacaactcaaaggcaagtaaaaccatgtcccttttggccagaagcatagtgaatggacactgtggaatgacgtgctcgtatagagcagcgctgcgaacttcgtcctcagtgaaccagcaatgatcgagatgctcatcactgatcttgacggaactctggccgattggctgttgcgtctcgctggaccagactcgttgcgccatcgtctcttcgttgtcgatggtgacatatgcctgggaatcccaagtaactatggctttgcaatcttttgcatacatatcctgttgaagaaagtatataatgccatactccgggtcaccgtagtaggacggacgtgattttcattccctgcgttttcgctatgccttggtcgttcgagtatgcactacatggctaggggtggcggaaaaaagtttgtatacttgcactcgctatatggccgcgcgcttggcagagatgagatcttcgaggatcgtcacgatggcttgccggctgttatcgcctgtgttgacgtcctcaaaataatgcgttcgtggccggttcgcttcttcctccgcttgcctgccaaacgccaagagcgcttcagtgccacttaattcttcccggaagcagtgttgctcggatgtcccgtcgttatccgagctatcgaaaataccgtttttgtccctgggtgtttttgccaactccgtgtggagtgtaaaaccccgaggtgaaacagagaaagaagagaagctcttaaatccgatttcgcgtattaccgttttatctaccctacagtatcctgtcttcacaatcaaaatcaaatatttctcttctttgcatcgagcttttccaccgcagcaagtcttcccattctttccaaccagaccctcaggtcaaaaattccctcgctcaaatccttccgattccctttaaacttgaatgtatatccgacatcgtccgcgggctccttcccatcagtatagcggatgcgacaagggctggcttggtagttttgtgtttcatatgctgcaagcctctccccatgttcaaccgttttgacatgatacactgcgccctcaatcacggagtctggagcatccaaaagtgcagggtattgcccccacaacttgcactcatagcccgataaacgtgctgggcgtagctcgggctcggtttccagctccaaaatttcacgaaccatggacgggtcggtcaacgtgccatagaagaaatagggcccagtcggtgcgtcgaacaaatccacgtactggggcgggttgggtgcttggaagaagtagtccgaaggggcggttctgagttttaagacgtagctggagattttcgagccaggaatttcgggtggtggtggtggtggtgggggcggactggtgagattcatctcctctcttgcagtattcgacataatcggagttggatggaaacaataattataactccaagaagtggaatagatgggtatacagttgaacactagaaagaaggtctattgagagtagtgctgagagcgaagtctccaatggccattgtttctgacgcctctagtgtccgttatgtaatcactgcggggtccgcctaggctctacctgtctatccacagtggtctgggctgcttaccgctcacgctagcagtagtgcacacgcaactgtccccagggatgtccccacaccaccagcgcttactgaagtacatcagcggttatctatatttactgttgttttagccaaccagagcctaaactttatgggtgtggattttccagtgagtcaacagtgtttcagaagggctcccgaggaatacgattgctcgctatagtggataaagaggcaattgatgagcgcaacaagcgcccgatggtgatattcttagttgtcggctgctttgcatggtttcaggtcattgcccacttccatgtagaaggctactataagtatgggcatactgtcttctaattgttatcacacactgggttttcactgatttgatcccatcatccttggtgttgtatgatcttcatcgccattcgtacttcaaaatcccgtatttcgtggcctattctgctctagtatattttgagagagcttcaatgtctcgaccccccccaccaccaccacctcctcccccgtcggcagcaggaagaccaaccagtatgttaaacgattttgtgacaagcacctattttctattctaacctataatgcacagtcgggaagagctctgtacgagctgagacttctagctatcccattggaagctttggcatcggagtcgaggttgagtttcttctacagcctcgtgagaatatcaaggcggccgatgatatcaggcaattttccaaggctgttgcatcttcttataatgcttacatggaccaatccgagcccggtagacatccacgtatgcataatgcgatcgatgaatcctacttagggcccaggtttgccgaatggtcccttgactcagattcgaccattgaaatgccgaagaaaggccgtgcgccatgtaggtactgtccttgccacaaataataaggtctaacaaaggataaacagggggactggagagcatttctccaatttttagggcacacgagggctctaggtggcgtcagcatgttgaattcatgtggagatttctacttgcggatttccatgtcgattctaatgctagttgcggcacccatgtacatctatcacgggtgggaggttactcattgaacgacctcaagaagatttgtcaaagcttgatacacttcgagccggcttttgaagccattctcccagaggaacgactcggcaatgaatacggacgaagtaattggctggacaacaagaattttggacaccaaaatttatcccgaaagcagagcattgccgttattgagcgagtttcgaccatgagggagctagtattactcatgaaccctgatcatgacaagatgtttggttggaactttctctatctgctgaacaatccccacggaacaatcgagttccgacgcggagcggcgagtacttcagtgcaagacgtctttatttatatagagattgcgatgtcctttctcgaggcctcggtccgactgggagatgtggaaagactaaagagtgtgcctgccactgtcggcggtctccagtggttcatccaagctgcgaagctaccagacggcattcctggattatttgactcccggtatcttaagctattcttcgctgggaagaatcaaagtgcattccgtgagccaaaaccgctgggtaatctttctccgtacaggctgaacaagttaaatcggaagaaggaagaagacaagagaaaaaacattgccatggtcaagattttgcaggagcctttttggagctgattaggtcttatggcatcaatatcccgatttatttctctgcaagtcgaaatattggcacttactgtcttacctgtttttcatacgttcttcttgattgatcattgagttagctttttgttacttctgaggccctttccagagtttaacgggatggttacataattgacattgtcctttaacgatgtcatattgaagttttaggtatttggactatcttccaatctatgatttacagcatcaaagcagccttttgtgttctatgtaagacgggcgtatacgaagcttgcggaagaagaggaggggaacattgttttacacactaaaccttcataggcagtaaagctcggcacgtactgttttacctgtgtttcatacgtttttcttcattgatcattgagtttgctttttgttacttctgtggccctttccagagtttaacgggatggttatatgattgacatttttctttaacaatttcatatatgctattgaagttttaggtatttgggctatcttccaatctacaatttataggccttctagcgagccccttcgcccttttgcctagttaccttctagcgctacacatagccaaccggtcataatcagtactgtaaggcaagtaacgcgctgcggaagttgttctcagagcctactctcagatcttaacctctaaccgcaaagcgcctgtcatccataaacgacaaaaaaagcccaaaatcctggagcatccgctgataagataaatacttggctgggttcccgaaggcgtattatgcccacacagacatcagcgtcgcacatcttgctgtattcggacttgcctttaatctggagatcaggcgagttggaatggaaggcgacccgctgactcattccaaaaatggcctgaaaatggggttcgtgggcgagtcgccagccatatgcaacctctatagcgctgccaactacagtattgggtcgccggctagcctagagagttaagcaagagtgggagtgtcggcggtttgaagtttcacggtttaggcttaacacccttttgcacacggacattttgaatgtggcagaatcgtcgcagaaatcggcggtcggtgaagaagggtggttagactcctcgattccctcacacccgtccataatcagtaagtctgtgtctgactgcaataatcgttggaatttgacatgaagctgaaatggcgatgtccagcggtattttggttcagaatgactcaaaatcgcgttgatctaaccagtgcgtacagcatagcaccatgcttcttgagggacatggcagggttgtgcttctatgcttctccaaagtggagcagggagtagcgtacgaccaatcatatcgacctactagtgtgatcccagagtcgttctgagaaacctccatagcctatagtcatatattctagcgaaatacaagtttgaaggacaagaagacccggaatccggatctgcccgctgaaaaaaacgagcacgcgtcctgtatctcgaatacgaatgcctaggcaaactgatgccattctttcttcagattcaatctttgtcggtcccaactttgttgaggagacttcctccgcattcctgtttgtcgatgaattggcatactcgcttgacaaggaacatagtgatgaagaaagggttagctctttttttagtccgggtatatacttgacaggcctgaaagagaaagcgaataatcatgataaaaaggtcgatgcaatgaatggcactcctccacactcagcacgacacgtaatagtccgaatattcgacatttacatggagttgactcgcgtacaccaaagccacaaacccacggacattttgcaatgtatcctgcatttgcgtgcaaaccgtatcattgttcctaaccctcctaatgagactccgtttctcggcctcctcctgtcaattcttcaagctgatcttcagggaagcacgacgccctaccgaccatgaggtattcaagaggggctcagcacagacaccgacgtgatgctagtgggggctgatttcattggctcatcagatgggcaagaggggtgggtacttgcacgtcctgaagaaccatgataaaatttaccgagtttgccgcagcctcagtgatgcgaacgtagtcaaaatgacacatcatgtcttggacatgatgcatctgcttgcttaccatgtatgatgctgtcgactaccacaaatttggtaacacgtcgcaaaaacccccgcacttgcatgcatgaaaatcaccgtattttcccctttcacctctgaacggtcaatcttatatagttcaaatttcaattttcaagatctgcaaactcaaagttgtggtccttagttcattgccaggactttgaacgaagtaaacgttcaatgttcggctcttcgccagcctggagatgccagagattttccaactcgcatcagccaaagagaaaaggtgatatttctcatggcaaaggccctgcgtgagctttaacgtttttgacatgatgatagacatgtggacgaaatcgttgtcttaatgtcatgtacagtcatttctatatccatttcagtctcagctgacacatgtgtatgacgtgtcaaaatatcgcacgcactagataacacaaagtacctctgtcaatatgagaaagggctcattaaatagccaagcttacacctcgctctccattcttcagtctatggagaatgactcgaaatatttttttgctcgcatattgtttttctcggattcaatattgaactgtgttccctgtaacaagcaatttcgctctcaacaagccttggagcagcacattcaggttgggcatcgttgtgagctttgcaataaatccttccaatccatccactcaaagcgtcagcacaccagaagcgcaaagaaccattccatggagaatcatcgccctgtagtcaaagctgcaccaccacaaatgccagtacaagactgccaggaagggaacgatcaaccacctgaattggggattggaacgaatggcgataatctgaatcttacatatactggagtacctcgagctgcagtaacaccggtcttcaaaatagcatgccgcctccgtttcatgaagcctgacgtcaatatgctactgagacgcatcgatacccagttagacactatggtcatctcagcgcttattgaagctgcccttcggctgttgccgcctgataactctcccaatggtagagccgaggcggaagaaagaatgcggcaaaagagagagcgggcgctcatccaagaaacgtcttttattgaccgaatgagagatctcggctatcaatttcggaccgagagagagcaaaaggaattacgacttagcccaacacctgacatccgatttcttgagccggtatcagtgaatggacattcctgctactggatagaatacaagaactactttgggtttaaagcgaatccatttatcacctcgaaaaacaagaagcaatttaggaaatatgtgtctgggttaggaccaggtgctgttgtatacaaattaggatatgaaattgaacacatagcaatgattggggtcgagacattccgggaggctgaatttctcaacaacctggagcaagagtcaaggctacgaaaatgagtgaatgactcataagagaaggttttgaatgttttcttggatgcatttcgcatggtaatatcaagcccgagtgatctaaatttctgaaacgctttttgagggtcgctcttaaacgtgtttataggcgaatatccagataatagtagtcaataactagatatcagtcaagagagggggggcaggggcgagagagttctagtaatgtccatttgtctctagattcctaaccattacttctgattggacaacgtctcatctagcgttgcagcgtaataaagctggctctgtatctaacgtaattcacaagcgagccggccatacaagccagccggccacctcgacactatagtaaatgcgatgtattctacatttaatctctttatttgtcgatagtcattgataaggctcactagcgttatatatcaatatcaaagaaagcagagagctattttgtgaccatttcaaaaattaccgaaaattacgttgctaaaagctagaaatatatatcatgcaaccacaaaggcatcaatcttttttaaacttcctagagatactagatatgacccaaaaagcaatactctacaaggaaatcttcatataaactaccgttgttgatatatcaagttgtaatttaccgcatttactatgtgttttggggtggccggctggcttgtgaattacgttatatcatctctagatatgccacttggctacttggtggatgaaaaactctaatgaatgacaaaagctcgaagatttgactcgtattggagcactgtaatgccagcagaaatagcatacaccgctggttccgccaaccaggcgctataatctcggcaaggtgcggggtagattggtcttcatattcaccaaccttgacaagtaatcgataactatttcagatttcttgggcttcgtgatggagtccaaaaaagcgattcaatttcctgagtaaggctcagtatttgccatgcggaaaagaaaaaatttaacaaacattagatttctaggctcggataccgttagcctttgcaccacatcgagctctgaatcatggaaaatccatcgaaagctcttggtgtcaaaatgcaaagctttggaatctgctttttctcatgacttcccggagcgttcatctggacagtatatattcaatcaaacaacccacgatactgtcgcacgtttcatcgaatgggcataccgggacgactatacggagctagatcttacacctatggaggtcaatcaaagatctcggccgagatcagagccttccgggccagctaaaccaagcgaagacgatcatttgcaagcgcacacattgctatgccacttgagagtctacatattcagcgacacatatttggttgatgatcttaagaacgtagcatttgaaaagtttacgacagttgttaaggatgtgggaaatccccaaaatttgaatgagcaacttgcaattattgactgtctattattggcgttctcaacacttcctccgcacgataagcttcttgaatggctagctcgatatgccgcttggtgcctctccagcttacgtcttcaagtgaagtttcatgaattgcttcagaaaatcccggcactcagctatcgcatgatggaaactttaagcccggccaaggaacctccttggaatataaaattgtcgaaataccgtgtcccctcttacgatgctcgcactggtgaggattttgcctatgaagactagtggaaagggggaagcatccacgatctcaagctctcatctctacaatttctatgatgtcttttcaagttctatagcaatatcacgctctcaggaaactcgcctaattcaaatttgtgagtgtgatagaaattgattctgaagatgctgcgggatccttgggcttaacttgcctattgtaactttactagttaattgatctaggcgatgcatccttgtaattatctaatctaatattctagtagacttaatgaaaattggattggaaagttttcatgagcattgaataagagttcggattggtcttgcttgagaaagacaacgtagtgggcatgttcacgatatatgctggcgatggatctgatttagttcagacagccggagcaaaaagcagctgccgaaaccgaccaaagtggatagcaggctcttagcattttgacaatttacctattatttatgtatattctccctccacggataggatcaaccaaagatgcgtcactccggcgcagcccacgcaatgccaattgtaccccgcggagcagatcagcaccgaatggaggatattcttgagtcaggtctgcaaatttatagtcgtcgcttcgcatgtacccttcgaccgaagcagcagccagaaggcgtcgtacagcatgatcatgaggcagattcaacgccgagatgatgtgatcagagttgataaaccaagtgtttcgatcaatgccgtagaattcggtatcagcgtcaagaagtatatcttgaatatatttcgccatttcggtttccaaccctagtatttcatacatgtctgcaaatcttaccagctccatggcagcagagatattctcctcacggttcttgatatcgaatctgacgataccacgatatagccattgaagaagtccttcgagggcacggtttgagataataccatccatctcttctaggtcgagtgcttggtcctgtgattccttgaaatggccgtttttgaacatttttgtgaagacaggtgattttgcacatagcaagtctcttgagattgcaatctcagcatcacttgtcttgactcggattttgatagtaggctcatggtagagaggaagcatcctaaattaaagccaggaaaaactccgttttcagggccgcaaggcgcacttgctctttgacgaaatcttttgcactaatattgaatatctcggccattgctaagaagtgcacaaagtgagtaatcgatagtattgctggatatgcctcagtgaatgctgctgaagagaaaatggcggggcaaaggaacatgaaaaatggtggtccacatgatacatctactaaaaaagggtcacctgaccgaacaagaaagataagcggcaacctgactgacttaatcatccgattttgctcaaagcctactgttaaaggtgatttgtgattgcgagaaatccagcccattgaatacaagcccccgcatgtttatctaccaatgtcgaagcgtcacctgaaccgagaaaattaaacgcgtcagtccgtggacagctcaaccgtcaaaaaaagctaccgatagaaattagtggagctgggaatggctcaattctggaaagtctttgacctgtggtctcgggaacgtttcttccttgcatcgccagattgaacttcaacctccgcctaatatgaccatatccatataagtgttggcgatgaacctacccaaatgactacctcattgccaatcatgccaatatctcaatcggagaccaaatggtgatgaaatacatccttcagcagcgggaatgtctgccaagtagatatgaacttgggcttagtacggttcgctacgataggtgcagtcgagccgcccctactttgtagtctgtccgggctcgttagttcatccgggaccctggcctacctgtgatgtgtatgccatctagaacattgttctggcctatttttattaaatgcatcttccataccttcttttcatcaagggcccgctggcgattgagacgccaagcaattgaactgtggtagcaaatcgatcctctggaccggcatatgaccacatctaggctgtcggcaaacatcgttgccgcatagcagagaattgaatggagattgagagcgaatatcgactgatggtagacctcatcccccgtcgcttactcttgttcactgcgcttacatctacgaagagattgatcacctgtaataactcagacggaaaccggcccgttgaatgatcatactttgctaaatcatatagtggaggatgttccctgacgccaaaaaaacccgccctgctataatcagccgctctaatgtccaccaatcgtgacgtgtcgcctcagctgaacagattgaacggctcagtccgtatcaatgtccgatcctgattcttctttggggtagtaattacgttcggtagcaaggcgatgaacatcttctgcgtgtctgcgaagatgcatttcatgtaggagatcctcactacacatatgacatctccgatcctgtaagtgcttttctcgaaagtgtcgcaaagttgatttgtattcgctgtacttgtgtgttcgatgatgaacggacagcagcttattgccgtaacattgaaagcatcgtcgaggttttttggccttccaaatatagtttcccgccttctccagaagcaattgctcctttgacatttcaggagagatcgaggctaattttgttgtttgctctttcattgctgagtgctcttcgtcgtcttcatcgcttggggccggccgtttacttcatccacggagtggcccgccttcaaggtgatgacaatattgcgagatagcagcgacagcagcatttcgtctctgtcgctctgcctccaatgaatgggaagttggccaggtcaacaacttttctagaagatcaatttgctctgacagcatactgtctgttcgcaatacgtttttcgcttcctcgttgtcgatagctgctccagagagctgtcgctcaatgtctaggttcgcctgtttacggtcaaactcctttcgaactttctgtctcaatgccctctctagccggccaaaggtgttgagcttttcgcgtgcgagtctgtcacgtcgcaattgcatctgttcactcggatcatagatgcagagttcagcttgctcatccaatcgccggaccgcttcgacatactctggatgttcacggatcgacgctcgttgctcaggagtcagatgccgaggccgtctggtatcaatccacctgctcatgcgggtgattgcacgcatgagagatttgttggattggcggccgttcatcacattttgcatgtccgtgtcaacatgtcgcggaaggtaatggttgaggaatgtgcgatcagcgtgcttcatgatcagattctgctgagcttcgctgaccgaatcactattgttcaacatctttccacctccatagcgcatgcggtgcgcaaacatcgactgaagccaaccatgaattccggggagattcatggttggcttcgaggaccggggattcaaaagcctgcagccagaaaagtataccaaagatgaaaacgtgggggctgaagataagcgacggatcgtcaataatttcggggaacgcaaaagtgttactaagaagaatcaatcatcaggccctttagcatcaaggaatattagatactcacatagcttcagacccgaagaaccgcttcgtatgctccgacctgacctcggccagaagcacgggagggccaccctgaggatccttttgtatagagaactgaagatgcttcaactgcaaggacagcagagcactcagtcgattcaccgtgaatatgccaagcatgctgaaaagacacatctgaatacgctcgtatccgaaattgaacccccgttcctgtgttcgaagaatggtctcattcaattcggtcaagtcttggacgtagactggttctttgcctcgctcttggtcatctagctcgaacttgtcgatcagtttccgaatcccctagaattcctattaagatacttggcgaactagtagactaatcgagcacgtcggaaccgcgaaaatatgatatgtgcgcccgaataaaacaggtggtagagggctcataggtcctaatcctccagcgactgttctctatctctatattggcaaccattagcttcacctgttgctttacaagataacagtgaatcgaggccaatgcccgatcaacatccgaaatgattgccgcactagaaatatcacttagttctctcttcttttgcccacataaattcaataagaagactttcgtcgacgttcttagttgaattatctctgttgcttgattggcagtttgcagttttgtattcagagatgaacgaaaatagaatcgatcaaataattagtctaccggaataatctgttcaacttctgactgttctgctggatagcagcttggggagacccgagtggttccctgcgaccgaaaatagcgacagcccgacatctctcccttccccaatatctcctggttggagcttacacccactgcacaaccaaccatggaggaaacctttcggtccttaacagcggagaaaatccaggagctgctagtaatctgcggaatcagtaactgcagcgatgagcctatcaggcaacacatacttggcatttctaacttcagtgagcccccagactgctgttcgagcaactttccactgacacgcatagtccgccaaacaagacagcaggatggaataacagatccaccacctcttcctacccccgcagctagtccggatcctgaagcaaagcgcggctcttatcggttcctccccacacctgaaaaacgaagtagagcggactacacggggctagacgcaccgtctcatagaaaggaaaggaagaacaaagtcaaggcgaaagataagactactctcaaagcaatggcgcaagggatgaatgatgccgcactacctctaggaggcatgccaaccgattcttcgtcaaccgataaagcgaacacagcgatgaacttaccgcgggctgggacacccttgaccgacttatacacccatcaagaaaagcgccgcatagtatcgttgagaacatacttgtcaattgtatcaagcttaacgattcacttggaagatacggacaccgtacaaagcagacaattatgacgacgaaagttgaggcgattcagagttttgtggacgacatagtcaagttgcaataccccgatgcagtccagctaatcaagcaggagaatgcattctctgcaagcaaaggtatccaatctcgatttaacgagaccgtgcattgggaaataatcaaaaaaggcgccgaactgcttgacccaaatgatttaccaacatccaaaggccctcttgatgaattcacgatggccgagaaggtcgccaccgagcgcttcatgaaggaagcgggttatggacttagccttgctaatcaacggcagtgccgtcttttttggaaacgactgttcgagatgcggaacgcgggtgttgacaaaattctcttgtatcgcacaaaggaatttgaccgcttctgcaaaagctactcatcagaatctggggcttctttggtagagatggtccggaactgggaagaaaggtatgccttccatatcaaacagttggaagagcgtgtggctgaggagagcaagggcgatttcacaggaagactatggctgagccagccgcttgtagcggacagacttagtgttcctgaaaatgcgtggaacagcgctatcaacccatggtcctccagcgtagaggaaaccgtcttccgattgagcggatcacacgagccatcagctgttgcgcttggtgggttctttgacttgcagccaaaggcagaaacaatgcagaacaagtctattttcgttactcttcaacccaaaggtgatgtctttctcgcggtttgccccctcatttcagtccaggaaggagatacccttgggatatttgctggagtgattcggtactcttcggaatgcggcgttgtctacggtatacctggtcccgaagaaaacctttggctggactacttcacggtgactggggtactaaacctcatgaagatatcagctcctggaggtgacttcaatgttcgtcttcagtgggagctcatcgacggacggagtgaagggcatctcatgtggaaggtctcggtcattgctcttcgggcaattcaaccatttgaagaaattgttcgcgctgctcctcaaaaagcacaatatctcctgcaccagtcgccaacttgcgcaaagcgcggttatacgaaaagccgaagttcctgattcttgttttttatttatatccagtgtctagttgagcgtattctaaaacgccattcaccagtgtcatccgtcatgatagagcaaaagtatatgtatttagcggccgtcgtagtcgtactggttggcatggagggtatctaaaatttggactgctaaggacactttgcgtaagctcagatgtaagacttttaaatgtcccaaggctgagttgcactgacgagtcaacagatagcaggggtgagaaggggcatattttgtgagaggggtaaacatgcattgtcccggtcgatgttacacagcccatctggcagtccaaacaggttccgcccgtcaggcaagcaaatctttgtatctatcaagagccatctctcaaacagaccagttatcagatacaagcactttggaaccaccaccactgacaactacaactattattatccttactttcggggaacatgctgtaaaatgagcaggaaaagagaaggagaaggggattgagaatacatgaaccaaggcccatgaaatgatttgaccaggctggtgcatgggccctgccaagttggatcagatgcgaagaacaacggctattatgacgcattgacaacgcatagttgcacttcgacagggtagccatgacttggcagattgaatatttgcttttttttgcgctcgtgagacgattctgaaccatagccaactaggctgagtgcgaattcggctcgattcccgtactgcaccggcctttttgcggttagtgttacctagaacggagacgtgtcatgtgcggggcaagtttgccaaacccactttaacaaaagatctgcttttcgtattttggcagaaaaataaaatggtgaacacaattccatgattcttggcataatttgccaggtccgatctgctccctacatagtcttcaatcttactgaaaggtgtatgacagaaaaatcccggagccgatacactacgctttgactagccgcaaagataatgaggatttactcccttttggacagcatctaatataattttcgctgagaactattttgtactagtcggccgaatggacatgatatcagctgttgttggtcttccgaggcaggagatgacctgcaactgaaggtagttagttacatgcagtcgctttgggcaacaaggtgtagtcttaaatgccgccgacgccaggaaactaaatgaaagccatctagttgtttaagaagggcggctctttcactttgactgcaatcttcccgaggaagaaaatttcatttgaaacgctatggaaactacaccctccgacaatgatatatcgcgggaaaccatgctacgaattcagcaggatttcctttctgcaattatatctgtgacaaggaaaagaaagatgaaggtgattgggaacatcagaaggctcaaaaagtatttggaaaaccaatatcttgatttcaatttccagattgatggggtctcacctttagcgcaagcaacagtgaaatttggagttctcgaaaagcttctgcaggtggaaagagtcgatttgaatttccgcacttgcgacggtcggacgagtctttattccgctatcatgttgccacagaccgattcaatgaatctattgatgagcaagggggccgagcttgagccgaaggataatcacggtcgcactcctctatctctcgctgcagagcttggacgaatagaccatttgaaacttctcgtggaatccaacgtcaatatcaattcaacagatgagagaggttggtccccattattttgggcgatatcaagcaagcaaaatcacgttgtggaatatttgctatcaaggagaggcattgctgtcggtgagaaagatgtggacggccgaacaccatttgttatcgctgcacaggcggagaatgctgaaagcttaaggcttctcaccaatgtcgcagccacgaccaaggaatacttcaatattgaaggtagtcctttggcatgggccattctccagaaagatatcaccactgttcgaatttgtctacaagcagattgcagacttggaattcgtcaaatttcaggcagaaccccattatcgatagcaacagaggttggaagtagcgacattgcgaggcttctcattgaaacaggagcagatccaaatgcggctgatgagactacatggccaatcctgaaacacttatcatttgaaggctatatgccttctgatagttttctgcgatacgttgactgttccatttccaacgccagcccaaattccacgggagaaaagccattactcctcgctacagaaactgagaatatcggagtcataaaactgttgcttgagacaggcgcagatgtgaacacgtgtgacacggcggggctgacagctctcacctgggcagtcaagcgaaaacttgagcctgcggttcggcttttgcttgcatacccagagactgaggttgattgccgagataaacatggccgaacgccattttcaatggccgctcaattgggcgatgtacatatcttgaaagagattgctcaaaggagccccgacatgaatacagaggatgaaaaccagcggacgccactcatattggctacaaagaacaagcatgaaagcgctgctgagtttttgctcaatttaccagaaactagaattgatcatcaggatgatcaaggtcgaacagccttttccttcgcagcggagaatgagctggtggagactatgcaaatgcttcttgagaaacaagcagatccacacattgttgattcgcacggctgcacaagcttctggcggtttcttaatgcaaggaagcaatggcttgactctctagaaaatgcgaagtttgccgaggtcaatccatttcgcctccaagccttggttcgctccctaccgacgcccaacaagcaagacccgtccggccgtaattggttttcatgggctgcttcatatggggatgaagaaattgtggagtatttcttgctggatgatggaaaggtggacgtcaatattcgggacaacacccaagaaaccttttctaaaacgccgctaatctgggcgctcgaaaatgaaggcaaagccatgacagagctgcttaaatcgagggaccatctttcaatgcatacaataatcgaagaattgcattcaccgaggaaaggccattcggagaacggagaccgaaaaaagaaattgttcaccctgatcaaagcactcgcaaatacgggctacaatctcgatcagcccgattcgaatgggagaacaccattgcatcttgcttgtctttatgaggatgaagaagtggtgcttactcttgttagtaaggcagatcaaaacagcaaggaccataacgcaaagattcctctacaatatgctttggcggcgagaaacatgaaaattgtaaatttgctgctggacgcgcgaggagccgaaatcagttctattagctcacaggaatggttcaatctgagagctgaaaggccttcttgggttcagatcacaaaaaggatgcaaagagaaggctttgatttggaactcgtcgataatcctcaatgcgattggttacctcgagccagagagtctagactttggtgagccattatatttgaacaaagtattgggtctactgacaagtgcagcctttgcaggacagattcaacatggtcacgattccttttacactttgggattcatgatattatgatggaccacaacacttatcttaaacattcccatagtgaatttggccaccgatcttttacgtatatatgggtgaatttccccattgaagaggaggatgagagtgccagggtccggtgcccgtggggcattgcttggatcagcaataagacaacagaaggccttgctgatggatttatcagcacattaccaagcgcatgcataccgcaaaatcctgctgactttgtggggcagttcctcacatgtctgtaccatgaatggaagaacttatgcaccgatgcaagcaaaagagttgaggatttggtgagtggatagaccgttatatgctatttttccaacgaccaatagactcacccatatgaaccacagcgaggcgaccaggtcaggaaaaaaggacggagcttcaatctcgttaatcggcttgccaagaattcacagtctcgtgcacgccttcggcaatgtttgcaatcgcacgttgagcaactcagagatatggtcaatatcgatccctcgtttaacttggaacaaaaatcgagaattttagccgccatcgacgacctcgcacaggttgtaaccacgaagcttgaccatttagagcaggctatcagagagcttttacagatcgtatgcttgcagcccagaatcctaatacagaaaattaaactaagtaaacaggaacttgcttgggtttcaacaaacgagtcagcgagcttcaagcgcctcagttggattaccgtgagtgcagcatacttattttggggaccatgtcagttaacaaacactgctttaccagtttgtttttctacccctgatgtttgtatcggtaagtcgtgctactcaactaggatttgccgtgcttggaattttggctaatgtcatggccagagtctttttgggatgaatgtggacttgctacaaaacaaccctgactggaaatggtacttattattcggggggttgtccctcatcttgaccgggactttgtggatggcttctaaattctttccagtcagtaatgccactgttctaaattgctagcgcagaatgctaattatcatggcgtagatacctcttcaaaagcaaacatctcgggcgccaagaaaacactcacacaagaacggggcgtcgtcgaaagtcacttcgagcatgtgctagaaaattgaagttcaagatcaagacctggagaagtgctttacgggtgatgcttcaccaaactggccaattcagtctggagaagcaatgatacaaaatatacgttctggagacaaaagcgcccaacttcatttccgccgactcctcgcaaaatctgtattggtaacatactagttatttatttgctacaaaaagggcatggcagcggcttgaacttaagttcgcgacaaagactattagagtgagccacgttggatataggtccttactgttctcatgatgatacgtttgcagattatttatatttgaacaagaaactctgagcagagtacagagaaacgctaaccgctttcagctcatcatgtcccacatcagtccctctcattcacagtcgataacaaagctagaccgtcatggcttttcgccatgaaatcactcaaagaaagatttcggaaacctctattgctctatgtcctcaaacgaaccggcaagcgactaaaacaatcattcatggacttgaaaatgagcggcgccacaaggcgattcgggaaattagttaagccgaagtctggctggcgtgatgtgattggcttctctcgcaccatcgttcagaatgccactagtctaaatcaggttactagagcaacgaatatgtttttgggggcctatgatgaacttgcatatcgctttgcgaggagtcaatgtaaatgaatactactactactactactaatactactactactatgataaacttgatggttgatgcagcaacagccattaaacaaatgccatacaatcagattgaaacaagcataagcaagttatataagcaaataatccctgatctctgttcgttacttgcttcacaatcaccaatgatagtaaggtaaaactccgcggacgagcacaaggatcactttctcagccgaatcatgaaggccatggctatctttcgtctaaaaaagaggcaccatttggtcgctaattgttatgagcgatggacttccgcctggagcgggttgatgacctccgggggacgactaagctagttgacatttgactagcttcatactctgctgctatgcacagcttctgcgaacttctcaactgggtcatccgagttaacgggtcacgattgccatcttttaccagcaagatgcatgggaatacggtcagaatgttcttatctcgagcaacctggttttggcaatttgggactgcgttatctcccgggaagggaaaaggctcccaatcgtcatcttcaagatcgactagatcaaactctgtctcgtatcgctgctgagcgcgttggactggaagccaaaagtcagccgcttttagcgcaatcctctctatactcgcgcggatcgaatcatgctgagtttccgagagcaatttccacagatatgaagacatattgcggaccaccgtctgaactcttgcttggagaagactctcttcggcattgagactgagcgagagaagaatacgtcggtaaaaactttccttctcggtatcgttctcggcgaggtgactgaggattccgtaaatttcagaatcttcaggtaaaatgtaattaggctggaagatatttttgcaaatttccctcgaaagaatagccagggttatggtaggcgcatccctttagcttcgggagagtttgagggtgccacggggacatattgctgagaaattctagcattctcttttcgaagcttctcccagatagatatgtcctttaggacaaacaaatgagcggacaagtcgtgaaaggggctagatatacacataccttcaagattttttctacaagatcctccttcaagacggtagttatctcgcttagagcaaagatccaaagatctgaaaagttcgtcgaactgggtgaaatatattagcgtacgaatgtctccaaatgcccacacgtaacttacatcgtgctttcatcaagctccaattgaggaacagtgaagctttcgaggtttcggagttgtccttggctcgtttgtaattctttgttcagtgtagctttctcggcttttaactcttccattttatgctgcgttgataaaagcattgttttgagacttgatccagcagtcttcattttgtcaatgatcttgtacatactagtactgtaaatcttcactctacactccaactatcccagctcacagtagaatcggacttgctccaacgaggcgaccatattccgggctacacgtagctgcacatgggtgcaagaaatatgcgcgcaatcactcgcgtacattgagcctatagggtcaagaacacgttgcattctagccctactttcgcatgcataaactagcatcacttctattgcgcttacaataatggggctcatgaacctcccctcgtacatttgtagagcacccgttcacgtgtagttctcgatcgcaatctctagatggaatccaaacatctataaaatggctgtgtggtatctcttcgcggctctttagaaacttataaatacatcagactctcttgtcggaccaaaattcgttttatgtattggcaaacctgtgaatattcatagcccaacaaagtcttttcatcatgtcttcttctagcgttcaaagccattcaagcgcaagccagtatgtcgcaccttcgacctttaacagcgatagccttcagagctttcttaagaaagtcagtgcactggcgtcaagccctgagtcccaagctgcgtcggctatgattgaagaattcggtcatcagcgtgaacaagtccatgctagaaatgaggagctaaagaaagcccaaaatgagatcctcgatctgaaggagagaaagcgagtcgccattgaggagatgtttgcggccaacgagagcgaaaaggcgaagcaaaaagaagctcttgatcaagtcgactgcgaaaccgctgagacgcctcggcgaagtccaatacggcctggaccgtcttcgcccttgaaacggtgtctggtttacctttctcaccttcgttggagcctcccagcagactcgacacgctgttcagcgcgtctccaaccttccctctcaattccgccctcagccctcggagtttcgggcactccattaatacgtggctgactgtctcctgcgccccgcactcgcaccggtcgtcatcgctgtatccaatcttcttccgatagctggatagccagttgtggcccgtgcgtagctgcgtcagcagatatgcgcgattcctcggtaaattcccgtagagcttccgcgtgtactgcgccggtagatcgccgtcaatttttcgcaggtgggcacctttggtacttgtcttccactcttgcccccattggtcgtaaattttgctacggacgaatgcgttctccctcgatagaagcggtcggaaggggtgagttttacccggctccgcggcttccttcgcgcgacgatctgcagcgtcgttccctgcgttttcacaatgccccggcatccactggaggcgaagtgtgatattctttgcttgaacctcggtggctgtttgcagaattgcatggacaattcgttgccccgatctattttttgcgttctggattgcttgcaaagctgatctgctatcacacaagattgttgccgttatgtgcgctccatttacgacgttggtacgttgatggaccagcttatacaccatattgaccgcatagaagatgccaatgagctctgcaacgtggaccgaccaacgttccatcggccccacctggatctgttgagattccaccacctcatcattgtcgtcgagtgcgacaacagcagcccccaggtggccctcgcggccggaggcgtccgagtagacaacaatgtctgacgtgtcctttgcggactctgccctgtctctcgctctttcccggtcgggttcaagctcaatctccacgaaggcgtcctttcgccacggcggcaacggtcgtgggtcgatcgtctctagttcgttgagcctgtcgacgtccatggtcttcaacgcttccgctagggggaagcgcgcgtacgatcctatgttgtttctacgattctgggcgcgtggtaatgcgctccaaatggggtggtcacgcggtagagtatgtagtctcgcgatggtgcgctgcgcgcggtgacgaaggcgaagatgcgtaggaagtatatgagcttccacctctaacgttgcggtggctactgtccggaaggccgatagaatgcggatcaacgcggttctctgtactgtgttgaggtgtcgcaggtgggtcttgtcccggagcgggtcatgccagactgtcgatgcgtagtctatgataggtgtgacgcatgcctggtagagctgtctcatttgttctgggcgcaagtgtcgtagtccacttaaggcgatagtggccttggtggcgcgtttgatggcctgctgaacatgttccttccagcgaagcccctgatcgaacgtcacccctagcaatttcgctgtgggtgacggtttgacgacagctccattgaaggtcaccccttccgggtgttctcctctctttcgggtgaggtggatgagctcggttttctccgccgcgaagcaggaccccgttcgttgcgcccactcttcgatacgcggaatatcctcagcctgtattttggctacattttcctcggctgaccggcccactcgccatcggaagtagtcgtcaatgaatgccgacgcgcctccgtgggagtcgacgggctggtcgaccagatcggcgttaaagaaagcaaacaggatgggagacagtggcgagccttgcgctagacctgcattcactagcagctctgtctcggtacggaaatcgtcgaatccaatgttggcgtgccggtcactcatgaagctcgcgatccattttcttgccaccactgggatccctctcgcctgtaaagaggcatctaggctcaccctgtttaccccgttgaaggcgcccttgaggtcgaatgcgattaaagttaccaccttgtgcttgtaccatgcttggtcgatcgcattcgacagcaccagcaatgcttgctcggtggttctgcccgggcgtcccccgaactggctgctcggtagcaagccatgcttctctgcaagataagataaccgtcgggccatcacggcctcgaggagcttcccgagcgtgttcaaaagtgagattgggcggtaagcaccgggcatcgcgtaatctggcttgcccggtttccgtaagacaataattttcgcgctccgccatggttttgggtggtgtcctaggtctatacacgctctgaagatgctagtgatgaagggcttcaaatatacccatagctttttccagacccgcatcggcagattgtcctcccctggcgcagtggttcctttcgctgttttcagggatcgctctatctcgagtgtggtgatcgggtgccacggaagttctggttgtggcgacgctggtaggctgggatcggatgtgttcattgcgggaaagaacgcttcaagaaaggcccttgctttgtctttgttctgggtgagctcttgtgagcccaccttcagagccggggtgcacccccacgtttctcgaggcttcatgtaggtcgcagctttccagagcttcccatcgcccgcctcatctaagaactgtttccaatgtgacgctttagccttttcgattgttcgagtccatgctcggcgcttagattgcatggtctgaaaggcagcagtggtgctagcgtggtctcgtccaagctctgcacagctcgcctgccatcttctgcgcagttgattgacttcgacttgttgcaccttgagatatggtgtgaaccaccgcttggagtatggggctgggcgagtgtcgggcgtgaactggtcgactgcctgggctgtcgctgatgtgagcttctccaccacccggtcgagtgttggccgggtcttgatatccttccaggggctcatcttccgagccacctcctcgccgattctggcccagtccgcgcgctcatacgcctttcttactttgtcgtttggcttgctctggggttgaagatcccattccgagtacgtggcacggtggtcggacccatagttctcgtgatacagatggcacttgacaagccgttccggtttgtctgtcactgttagatcgatggtcgagttttggcctggattgttcaaggcccagtaagtcgctgtccctcgggggaggcagctgtggaggttgtggctttggagaaactcgatcaggtccccggcctgctcgatgaatctgggtgggatgtggttgccgccccacagtgggtgatgtcggttgaagtctccggatagaatgatgttcgtcggccgctgctcattgtgcagcgtggtcgtgatggtgttttgtattgctgtaagggctggtagtgctgactcatcgtcgcccatgaaaagcggtgctggaggtatgtagaccgacaggagaaggatttgggagtcggctgaccagatcttgatggctgcgacatctgggtggtcgcaaggtatctggcggtgtgaggaggtggaaagtcgtctattgacgtagatcaggctgcggaatcgaactgcgtcggtttgcgtagtaggtcgataaagtcgccaagcgctgtggttgacatgcgtgcggtatgtggtaatggatggctcctggatcaaaagtgcatccagatcttggctctgagggtcattgatcagtgcctccattctcggtcctgatttcattatgttcaactgtaggactcgaaggttcctttctagcatcttgtggggttgaaggtcgccggagctgggcactgtcgatagcccgtagggtgttcaccactacagtcgaggcatctggccctcactccgggtgggcagcgctcccgttcgtgttggcccgcacagtgtccgcatcgtggcatttctttgcacgtccatgccagatggccaaaccgttggcatcggaagcatctctttctcttgatttcccgtcgctccacctggtgaataaagttcccactaacaaggaacccctcccgaagcatatggtccgctccttctgcggagtcgaaccaaatgcccagagaagcaaatttccctagggtcttgtcttttgctttcatccaggccagctcttcgatgcgaaagccgtgttccgctagatcgttgtcttcgataattttttctaccgcctgagtggccccggtttccaggtcaaattcctcggtgggggttcggtgtacgacgaccccaaaccgtggttttaccagctttgtgttgttgcccaattgatgtagccactcggtgttgctgcgggccgcctcagtcgactccgtgttcttgaatcgaatgatatagccagttttggtagtgccgaccccggccacttggacgtcttgcgttgcggcttcgctctgcaatgcggtgcgaatgtggttgttggcggcatcgatggggaggtatcgcccgaaggcgtttccatcattgtcattactgtctcttgggtccacaaaggtcctttgagtgctgattcgaatgcaattttgctctttctcgggtttagggtggttcagcggggaggtgtcattgccgccgctagctgcgactgtggcccaggtcctggtcgccgtcgctggtggggtgttttccacttgtgctcgcaacgctttcacctcctcgtgaagcttttcgttctgttcctgaagaacattctggttgtgtttgatctcctgcagttcatcttgggtagctacgatggccgcggtttggcggcggatgatgtctttcagcgtgccgatgagtttccacacctccttggtggtgattcgagcagcggggtccgcaggtgcgaagacatcgccactccgggttcgcttccggctctcagagagcaagccggggctgtcagcagccgccgtagcctgcagttcttcccctggtatgctggtgatcgtttcttgggtgtttgtgggaaagggctcgggccctcccgtcggtgggtccgacatcgctttggggatggttcccgctcggtacacgacgttaaagttaaaccgctggttggatacagggccccttctatgccttgaagtacagtgcgccaactagatacagcaatattcgcttcagtacaggatcgctcggtacaggatcgagtggttcccgcaaagatcaggagtgtacagggtagtagtagtagtagtagtagtagtagtagtagtagtagtagtaggattcatttaccctgtcccctcgcgaacgatatgcaggatacaacaactatatatcatgaatgaagtacatgtagagtggtccactttctgactgaatcttagagcctcgtcacggcctaccctggcccattgccgctcccgctgttaggctgcccctgtggcgtacgactgcgaaaccgctgtgnnnnnnnnnnnnnnnnnnnnnnnnnnnnnnnnnnnnnnnnnnnnnnnnnnnnnnnnnnnnnnnnnnnnnnnnnnnnnnnnnnnnnnnnnnnnnnnnnnnnnnnnnnnnnnnnnnnnnnnnnnnnnnnnnnnnnnnnnnnnnnnnnnnnnnnnnnnnnnnnnnnnnnnnnnnnnnnnnnnnnnnnnnnnnnnnnnnnnnnnnnnnnnnnnnnnnnnnnnnnnnnnnnnnnnnnnnncgagtatgtacatgtagagtggtccactttctgactgaatcttagagcctcgtcacggcctgccctggcctattgccgctcccgctgttaggctgcccttgtggcgcacgactgcgaaacctctgtgacgcctcggcgaagtccaatacggcctcaaccgtcttcgccctcgagacggtgtctggattacctctctcaccttcagttgagcctcccagcagactcgacacgctgttcaacgcgtccccaaccctactccttaaaatcatccgcaaagctcgtagttttagacattccagcaacacatggctgaccgtctcctgcgcgccgtactcgcatcgatcatcgtcccggaagccaaatttcttggcgtacgtggataaccagttgtggcccgtgcgcagctaagtgagcaggtatactcggttcctgggcaagcttccgtacattttcctggtgtacctcgctggtagcgcgctgtccaccttccgtagatacgctcctttggtgcttgagttctactcctgctcctactgagcgtgaatcttgccgcggagaaaggcgttctctctcgttagcagcggccggaaaggatgggttttgcctggttgcgccgcttctttggcgagtcgatccgcggcctcgttcccggcgatttcacagtgtcctggcatctactgaagacggagggaaatatgccctgcttgaacctcggtggctgcttggaggattgcatggatgattcgttgccctgatctatttcttacgttctggattgcttgcaatgcggatctgctgtcgcagaggattgttgctgttgcttgcctttggtttctaaagattgcgcgttggtgagccagtttgaatatcatgctaaccgcgtagaagatccctattagttccgctatatgaaccgactaccgttctatcgaccccacttgcacctgttgcgaatctgttacctgatcattgtcgttgagggtgacgatggcggctcctagatgaccctcgcgcccggaggcgtccgagtagacgactatgtctgatgtgtcctttgcggacgccgccctttctctcgctgtgtctcggtcgggttccagctcaatctctgcgaaggcttcctttcgccacggtggtagcgggtgtgggtcaatgatttctagcttattgagcctgtcgatgtccatggttttcagcgcttctgctaacgggaagcgagcatacgatccgatattgtttctacggttctgggctctgaataacgcactccaaatgggatgatcgcggggtagagtgtgcagtctcgcgatcgtccgctacgcgcggtggcgaaggcgaaggtgtgtgggaagtatataggcttctacctctagggtcgcggttgctaccgtcctgaacgccgacaggattctgatcagcacgtttctctgaactgtgttcaagtgtcggatgtgaactttgtctctaagcgggtcatgctagaccgtcgatgcgtagtctactataggtgcgatacatgcctggtagagctgtcgtatctgctcagggcgcaagtgtcgtagtctacttaaggcgattgccgttttggtggcgcgcttgataacctgctggacatgctccttccagcgaagtcgttggtcgaataccacccctagtaatttggctgtaggcgatggcttgacgtcggtcccatcgaagatgatttgtccttctctgtgttctcccttctttcgggtgaggtggataagctcggtcttctccgctgcgaagcaggatccagttcgccgcgcccactcttcgatacgagggacatcttcagactgtatcttggacaaattttctggtactgaaccccccactctccatcggaagtagtcgtcaatgaatgccgacgcacctccctgggagtcgacgggctggtcgactaggtcggcgttgaagaatgcaaacaaaatgggggaaagtggtgatccttgagctagcccagcgttcaccagcggagcagtctcagtgcggaagtcgtcaaatccaatgttggcgtgccggtcgcttatgaagcttgcgatccattttctggccaccagcgggatccgtcttgcctgcagcgacgcatccaggcttgtcttatttactccgttgaaggcgcctttaaggtcgaaggcaattagggtcaccaccttgtgcttgtaccaggctttgtcaatcgcactggacagcactagcagggcttgctcggtggtcctacccggtcgtccgccgaactggctgtttggtagcaggccgtgtttctccgccagaaaggataaccgtcgggccatcactgcctccaggagtttgccaagtgtgttcaaaagtgagattgggcgataagcaccaggggccgagtaatccggcttgcctggtttccgtaagacgatgatcttcgcgctcctccactgtctcgggtggtgtcctagctctatacacactgcgaagatgctcacaataatggcctttagatgcttccaaagcttcttccagaccagcatcggtaagtgatcttccccgggtgcagtattccctttagctgctttcagtgatcgctcgatctccacttcagtaatcggatgccactgaagttccgtctccgttgcgctgggtgggctgatttcgggtgtattcatggtggggaagaacgcatccatgaatgccctcgctttgtctttattttgagtgcaatcctccgagcccactcgcagtgctgggatataaccctatgtctctcggggcttcatgtatgtcgcggccttccagagcttccctttaccagcttcgtctaggaactgcttccagtgcgaggacttggctttctcgatggtcctcgtccacgctcgtcgtttctgctgcatagcttcgaaggcagccgtggtgttagcgtgctctcttcccagctcggcgcagtttgcctgccacctcctacgcagttggttgacttcgacttgttgggtcttaagatctggcgtgaaccatcgcttggagtatggcgtcgggcgtgtgtcgggtgtgaaccggtcgaccgcctgggccgtcaccgctgtaaggttttccactacccggtcgagtgttggccgggtcttgatctgcttccatgggttcatctgtcggactacttcctcgccgatcctagtccagtccgcgcgctcatacgccttccttgctttggtgtttggcctgctccggagttgaaggttccattctggataggtggcacggtggtcggatccatagttttcgtgatacagatagcatttgatgagcaagtccgggttatctgtcaccgtctggtcaatggtcgagttctgtctagagttgttgaatgcccagtaagtcgccgtccctcgagggagacaactgtggaggttgtgggcttggaagaaatcgatcaggtcgctggcgtcttcaatgaatctaggagcgatatagttgttgccccacattggatcggctattgcagtgagcaccggcattgctgacgcgtcatcgaccgtaaagagcggtactggaggtatgtagacagaaaagaaaagagtttgagaagcggccgtccagatcttgatggctacgacatctgggtggttgcagggaatttgaaggtgtgaggaggtggagatccgtctgtttacgtagatgagactgcggaaccgaactgcatcgtcaatggaattcgaaatcagttttaactttaaactcttacaatttaattccctgaccctaagtggagacacgctaatctaattttagctcttccccggttgatccatgtagggctgtatgtattcactggtaaccacaatgggtcattgttatagtaatcgtgactaagcattcacctaggtgagccaaggcctaaacacaaaccaaggcctagacacaaaaacttcatgctttcaatttcagacctatttttcagctatcatactatctatatttacatatttaaagaactcatcatctacatcgagataatctctacctcctgatgcctcttctttttctttaagagcttggttggcccgaagccagtagtctcgaatccttgcatgcgcactctcgttgccaatgtccaattttgtttccttcgtacagcgtcgatgaaccctcgaattgcctgcaattgacgataatggggacttagaagcaccctttataacacgctttgattttttgacaggaattttgtggctttgcatctttttgatcgtctgctttgcaagggctaggtcttggatagcctgcttgccgccacgaattgcacggtttatatgcttttgaaccttcggaaggtctggctcgtcgttttcgaatatcgtttgaagcttattctcaatttttgagaacctttgatccgagttcggcggcgaattggtgactgagctaggaatttccgcctctggcgaaggtgtatgaccatagatctcaagcactggttcatcttcccagccaggatcaatttaatcacagacaatatttggattccaaggccaaataccagtatcatagaatgatgatttaatagttcgtgatttaaatgtgtctttgcgaactgttttgattaaccgaagaaaatgccgtttatcatcaacatctccaccccatcgtacgatctcattattcttctttcggaatttctgtttaaggaccgagaatggcttgccatcgagaggctggcatcgatgtgtcaatttcggtataaaccaccaaggtataatattaagggattggcaaaggtattcgaattccggggttccatgagagccatggttatccataaccaaaaccctaggtctacctttggtaactcgctttttggtggtataatggaaatccaatagccattgaatcgcagttttatcgtccgtccagcctttagcagttggtttaataaccctataattggaagggtcattatcgccgtcgaaccaatcttccatttgttcagaaccacacattaaagatcatagatgtataacccagccatcggctgaaatgcattcaataccagtgatattctggcctattccaccggtcgcaatagtctcattttcacgggtagaagcgacgttttccttagttccaacgcctagctgaaagccagtttcatcccagttatatagttcgtgggcctgaattttgttctttttaaggaattggccaaagaccttataccaatgaactaattcaccgtgtaattcggcctcgattctcgctttttccataggcttttgtgtacggagagtgatatacggtggtaggcgcgcgataaattggtagccatacattttactaacctgccggtcggaaccgcagtgctgtaaaatgcgatttgcagcgccctcaatatctaaagcagtcggtggtgtatatactgaattaagcagctcaatgcagcgaatcagggatctctcttgcgactgatttagtgctttgttggtggctgtacggccttttttactaggcgtgccgttacttcgattccgaagcttccactttgagatgccaaaatgagaggctgcggcctgaatactcttgaattggcctaatttataggcatcgacggcatctgagagaagaatctcttctttttcggacgaaattggcatagttttggtggtaaaaagtaaggacaaaaattgaaggttgaagtttttgtgtttaggcattggtttgtgtttaggccttggctcacctacacgcgggacgggtgtaggtgaatgcttagtcacgattaccgtaatttctttagaaaccgatggaatccatcgtgcaaacatatcaaacaaaaagagaatctggcaaaatcttctttcattctctcatgtcttggtctatttgtcacgcgcagccttctctttcgcatctaaaagaaggctgtaatgacgccagagagaaatcatcctggtacgcaacttgtttctctacagctttggcctctgttatccactgcgattctcattcgttaccaagtcctaaggaaatccgtcacttggggaagttgacatggaccctcccaggactgccatcgtactgtagagatgacacagagcccatattaatcttgttcaaaagtcgcgatttaattgttttaagacgtctatctccctgtgccgttcatcatagaatgaaaagtactccggtactgcgcgacgtggcgaagagtaattcgtgtcaatgttgtcggcagtatgagaaccatgtattggtcagattcccgcgctcgtgttagatggtgattggcagctattaacgtggctgggtctcgaccgtttcgaccaagcctaggagaacagcacgcacatttgagatgtgttcgatggggatagggtggagatgatcctgcactcttacatctggtcatcaagtcagcagtataagactttcggccattgaagatttatctccgtgctttctcagtaggatattcaaagagatacttcacaagctgcatttttacaatgtctggtaagtatgtcatctggccgcagccgatgtatttgggcgtattattaacttccatagcttccgaaacgtcacctgataggcgtccagacccagaatctttaggcaggtgcaccgttgcagagattttaggaagtccatctctcgaggcctccctcaaaagactcgatcttaagaccggccggggtcccgaatttgtggataccgaagctaaggttgcgagtctggttgggaaactgcaagacttacctaccaacccgccgtctctttatattgatcttgaaggggtcaatctctcaagacacggtagcatttcggtccttcaaatctacgttcttccgcttgacgaaacctatctggtcgatatatacactctcaaggagaaggctttcttgcagccggcttctaacaatgaccagaccctactaggtatattggaatcaccatgtatctctaaggtcttcttcgatgtccgaaacgactcagatgcactatttaatcatttcaatgtcaaacttgccggggttattgatcttcaattgatggaattggcaacccggtattactcgaagaaatacgtcagcggactggcaaaatgcatcgatagggatgctcctctcacgactgatgaaatgcgaacttggaaggcatcaaaggaaaaagggctgaagctcttcgctccagagcgtgggggcagctatgatgtgttcaacgtccgccctcttccagatgatatcaaggaatattgtgtgcaagacgttcaattcctacctaagctatgggtccagtaccaggggaagatatcgtcgtcttggaccaaaagggttatgacggagagcgctaatagagtaatgctctctcaaacagccacatacgacggaaagggaaaagataaagctctagcgcctgtaggctggtggtgattctgcgattgctgctatggtctttcctactatttggtcggacaagtttggctacatccattctagttttagcggagtctgcttgattgaaaggtacaaattgcacacgaatacgtttttcgtcaaagcgaaaagggcagcaggagatggcgcgcccaaagaaacgctgagcaactatacatagaaccgggctctcaagtctgcgggataagagattcatgcaccttggctggtccgttctctgccgagtagcatttattggttgccggggaaacagggcaacgaggagtgcgtagtgacgtcaagtactggaaatcggctgagttgtaagagcagggtgaaaaaattatcgctggtagacttggggggtggcagggtataaggaaatgcacggacatcagagcaagtggagacaaataatactcgaacaaagaaaacattcaccaagaacttatttcacgtttgacatgcgcataaaggacaaggaccgtaaacactaacactgccgtcaacagctcttgacttcctatttactcaacgtttatcgagttcgtcgtgtgcaatggtcaacacacgtccaggatcaaccaatccacccgagttccacgatgacatttcttgaagggcatccgtttcctccctctactatggcgagagctcaaacacgttgaattggcctctcaaggccatcgaaaatgagcggcctctcaattcttcaatgccgctgcacttaactgcgtttgcccgccttgttccggtttaacccagctagctgtttttctgattaaactacgatatgctgagttagggagctagattcaatcattgctcctaggatcatgctcacggcctctgggagctaaatgtcctccaggaactgtacctgtcactcctgggagcgagacagatcgttcctgggctctccaccttggatcctggagccactcccgtccgttcacagggagcgttgattacttctgggagcaattgttccgctgcccgaaattattgcccgctttttagatcccgcttattatctcacaagtgagactcacattcctatatcatatctggccgcaagatccatagtatggttcctaggtacgctcatggtcgctcctagggattagattcatacttcctaggggatctacagctcccgggagtggataatagcttcggggaactagagtgggttccctgggctttaacgtttagcacgatcggtgccgtgggattagtggggtcacccacacttttccatctggtcctggccccctgagtacgattcccgggatcacgagagctccccggaattaacaaatgattcccagaggtagggcattaggaatctaggaatacaaatctagatactaggagcaactagggctaggaataattcgtgtctttccaggaacttgcatagagaaggtgacttgcgtagggacacactggagagtagggacacactggagagtagggacacactggagagtagggacacaccggagagtaaggacacactggaaaaatccgggtggggcaatgagcgcgacactaaaatttgtgtcgcgcctgctgaagagcacaggcgacacagaaagcgacacgtcatatgaactggctcttcgtaccacttctcttctagtccaataatcctatgcctagataagtattgagataatccaaaggcgatcaagctcttctggcagggcattccatttttggactagtgttactctgaactccggaaacagagacgctaagtgtttcacgttacatagttcgtcgacgaatgataagattgttgacaaacagacagcaatcaaaacagactagctatagtatatagaaattataggggagactaaactcacaggatttcaatctcgtgaagagcgtagtcagaaggttttgagccactacagtcactgggctgtcgcggccgtcagtcaatggacctggagcccagctagacctaaagctgtggacgtacgtccagcttggactcaaatccacagcccgaagtacttggccccagatcggctgctctgggcccttgtctatggaaccacagccctcccactatagctcctcggcattggacgtgcgtcactggaccactggcttgcccagatagtggccccaaaaccgcagtcattgttcctaaggctatggcctatagtcctaggtggctcacgagccacggaccatgggccagctgggctcagtatctatcaaccggcgacttggttggattactaacctggatggcctggtatcgagtactaatatgttatactaaatacctctggccaatagtcggccacctctagccactttgtcccgggttactttaagtttctgcccgaggttcatagatattgtcgcccttcctctctttatcgggtctagctcagacggacctgatctagtatacattcaaaacacacctgacgctccctgatttagaaactttttggtttctttattctcagtctgttgattaccactctcccgaaatccagggccttctcaacggcttcttggtgaatacagtgaaagaactggcgtgtttattgaaactattggccaaacagcagccccacaccacgcccatttcctaatacccaggcaacccccaagtctactacaggaatcatttcagcctgtttcagtgatatacatgaagcatacaggatgtttggagatatgatctgcgggacccacatggtgcatatcggttcccctggacgcgaggaagctatctttcttttgcttccacgcgctacgtcttgtatctagagtcgactacagctttatttaatattgattactgatctgaatacgctgtccccatctacggatacgttcagcattatggaatccgacgcgagtccagtgtgtagtaaggacagccaactactcgaggctagagagcagtgctagaactacgccaccgtaatttatggactatcaaatgctgtaacttcttgattggacgccgttcgggtgctctcttcccctctgttctcgactaagcactaacgttctggcacgccagctcacttatgagttggcagttagtaccctatgccggctacccagggactggccctcccctctcccaagctgcttttgaggtataaatccaaactcttaatcccgttttcttttcttggctgacttaaaaccaaaaccctcgcatatcagttcttcacaacaacttaattcagccatggccccacaagcattttactatgcggtttataaaggtcgtgttgacaggcctgctatatattgttcttggtaaatgagatcaaatccggaaaagtggcgcttttttcgctgatgttctatctgtctaggagccaagtgcatccaagagtgacaggatgcgaaggcgctgatcatgaaaagttgaaaacactcgaggccgcctgcaatggaatgttccaaagaggaatcaaagattttgatatgcccatcaaaaattccgccaaacgagataccatgccagtgaatatgggcaaacattgggctgtagctggtggcagggctactggcattttcaccgattggaaggaagtttcattcctttcgtatgcaaagtcaatatctaattagaataggagtgcagaaaaagccatcaaaggaacaaaagcctgccatgaggcttttagctcccaagaagaagcagaagattttattgcaagttggaaagatgccttcgctgacgtatcgcgactggccatcagacaagcattagagaatagatggaagcctcgtaatatgaagtttaatgttgagtcatttttaattagagacaatgagaatatgatggggaaaaacgacaaagagatcaagttgtgtgggattgaaaaagaggaaaacctttttaaactttgaaaagttggctatcaaagaagaacataggatatgaagcttcgtctactggaccctggatctacaatcaatctattgatacgttctgaattgcacccgaatatacaaaccaatgctctctgaagtttgtaaaagtttgcatcatatcacgattccgcacctatacaagtctcttgtttttaccacccgggagttgtcactgtcaagcctgtgcatgcagatagagtctgtcgaatgggacctgagatacacgcgggaactaggatttcgagctccagttcatcaccggagggcaagccgttgtgttcactttgacgatggaatgggtgaacttcctacaaattccacaacactatgtcggaaaagcgaaagcagacgtctgagtcaaggtgtaaagcctcgctattgttcgctcttgggtggggtcgtggacgagacattgggcgcggaccgctccgtcgtcagcttaaagcctcggccataacgatctttgaattccgataaaggtttatcttccaagccttcatcttgccctgctgaaggcgagcccctatgatcggtgttcgcaaaattcaccctggtcatattctttgacaactgttgaagcggtgcatcactaagatggcccccaacttgccttgtcctccatcccagcccacgatttctgccatgaattattttctcattggtagagaccataaattgaatggcgtcgccagtggcataattatcgatcgtactagcattttcgtccaaatgggtcccagccttcgagcagatatgcatgcattgacgagttgtctcccactcttcttgtaacctgagcagttttgcaatgtcctcctgagaggctgttaaggttgatgtcagtgagcgaatgggtttgaagcagcaaaggctttgttctttaattcagagccacggagcagaatccctgtgatgcatagaactgaattttatgactacatgatgcaatactgtacaccgttgacgagtacagtacgtctcactcttcgattattcctcgaaccttgatgccaatatccactggactatattaagagtaaaactaggacgtaggaaaatcattaatatacaacacctttacctggtagattgagtgtgcaagggtggttccagtcatcgattaagctagtcaatcgatctcgagatgactccagtgcctgctcgaagaagcgcaatcgagacagttgcttgtcgtggcgaagctgaagaccttccctctgtgctctcagctgcataccagtctgcttcaaaagaacgttatcccgctctagcttctcgccatcaatgtgcttggacacgcatgactcccagaggcgttgatagagtccaacgagtcgagctagaaaggctaacttgggatcgtcgcgttcgaggtttgctagcaccttcgaaatggcctgaaagggctcagtcgccaaggtaggtcttctttctgtttcctgctgtgaaggggggaactgcgatagtcagcaagaatacttcaagccgaatcttttcacctaccaatggagggacctggcaagaagtttccggcgagttgtttttatcgtttaagattggcaattcactgggcccctgaacaccttccatttcctggtctcgcgagttattcggggcatccattctgcctaggggagaatgtcaaagatctgggcaatgccacctctacgaattctccatgtgtcttatagactagcagacgcaggtggttctggcctgggtttaccggtcaccacattagtcaaccaacgaagtcagcatgtgaatttttattattatttccagcacgcgattggtaattgggagtcaatttgatagaggcagactgatcaacgagtcgcccggggagatttgatcaagcttcacgatgttgagggtatccgaacgcttattgaggaaatatctaatctatttcaaagatacctccactttcgttgaaagtctcaggaaattgataaacaaaacattgtagaattgacagccatcaaaggaaactatgaccccaatatgtcttgatggtcacaagttcaaagaatcgaaggtatggccaagcttcaacgggttgacgggccgagcaccggcacacccgaccgtgacctcgctttccgcggtcgagacagctcaacaccaacacaacacgaaatcgaggctagggaaaaaaattcatagtttcaagtgacgaaattgtaggcgcttttcggtgagttgacattccgtttctcgataacgtgaacagaataagaaatacgagcctgttaatacggattgaatatcgtccagaaatcattagtacaagactgccgtgaaggattcaacaatcagtcaacgtttcttggccggcttagcatccctttttccgaaaaccactcttactcgtctctctcgctgagcgtctaaaagcatcaaagatgccgctgcaaatacttgcagtaaaagaagacataggctttgattggccttacgctttctaccaataagagcacttacgcaataggatgagccgagaaggctataagtacgtcttctgtccatggaattttgatctatcgtcgattcacttgactctgcaaaatcgagcaggcttatgtctgaggtatctgataattcctcacactttgactcagtataaaagttcgtattgtactaacatttataggatatatcgtgtaccagcaagtcagacggtatctgtgagcgatgatttctagcagataatttgccaaccagccagccgatcaacgagacaagacaaagcaggctggtcaacggtctatgagcagccgactgagctgatctacagtagctcttctgtgtatccccaagataaaagctcaaatattcacgtcccaggtaagtaattttgagcccgacctatcggaaattcttcttatcctacaaacaatgcgatttgaatagaaccgaggacattcaaccacaatgtacgagcgcaagaaccacggttctttgccgtctcttcatccctggacccgagcaccagaatatgtgagtgatgaattatctacaaactaataaattgcagcgagccattggtaccagtatgacccccgaggatacaacacccgtgttattgctctgcactaaccatggtctacacccccgtcctggtcccgtcgctatcaatcgagcaggacacctaggcaaggtttatagaaatcaaaggagcgggccaataacaggatacgaacattttattgcgagtttcgcgttatagaagcttgagacgtctattctgccggtaaggtaagtgatttatcgtgccttttactgggccatatctatttatttgtgcaaacttttatggtgccaaacacgaatccaattactgattttcggtatatataggagcagcctatcatcgtccgtaaacatccttggggtcctattgccctcgatcctactgccttcataccataaacggcggagtggataaacctctttctggccgttagcatcgcgaggtcttctctcatcacaaatgcacagtttcctgttacatgggggcttgccacgcgcctttggcgtctcagaagttgcccggtgcccccagtacaggtttatcgaagcggtaaccggagagtgcgatgcacatgaatccaacacggcataaattgtgactgcattgccggggagggctatatgctctagtcggtaggccgataggatcacaaggctaattgatgtcccattcgtaagcgtacactctacggagcttataaacaggtaagtcgtgacaactcgtccaagtgattcaagccttgctaactcagatcgtataaccgaggcacaggcaaaccaataagagagcccactacccaagaatcacctcggatatctccaagctgtataatgagggatttaaatagtatcatggtgtatcctgctggatagatggttggtagatttgactcttaggtgcgcattttctatcccaaccgaagcaatatgtgcagagaccattgaccctagctgtcactgcagcaggctagttacgttgaccgcgtttatattttgtctattgatatcgtcttctaaacatatcacgcctaagcaactgtggctaggaaagcgctggattctctacgtcccctctctcgagtattcactcatacaaaacagatcatgaagataatttgtaggtcttcgcttcttctagtactgtcaaatactcaaattctctccccgtttcaaacactctctgctccattccttcatatggtactgatttgtagcagtacctcacggcgtcatcttcacagtcccctcgtatcgtccgattgaactttcagatcgctgcaacaaaatgtatcagaatcaagatcactactgcagctccaaaggcggcttggccaacagctccatagtacatgacgacgtagtacggaaacgaaccatctctgtcaagaagttcaaatgaggattggagaccgtgaatgccacctgcaacacagcctcctattgtcacaacaggcaagctcaggagaaatgacatacagccatagtagactcgagccttgcaatcttcctgtatccatcgggggtggaccaaaataagtataccaaaaatggaaagcattgctgagataagggccgtgataaccatggtaatgagagtgtcgctcataagcttctggagtgtgatgtccagcatgaaatagttggcgttggcgaggtcagattttgcgcggttttgcaggacgtccgcgaagtgtgctaacgctgagctgagagtggcaagtcccagccaggtgacagtaaggaaagaaacgatcagtcgtatccggaccacgccattagtgaaaatagaaggcattgttcacagaaacggtatctctgatttcaaaaaagtgatttggggcttgtgctggcaagttcttgaataatgagagaatggaagcaaaaaataaagtggtcaatatctccggacacaggcaatctatttatactttccagtatatacagtgctctgtgcatacgaagcttgtctattcaataaaagacatagtcgatcctcagctgtatcaagcgccctttgcattgtccgctgcctaagtggcaatctgcataggtttctccgagatatacgttctgcgacttacattgctatcccttcttggccggtcgctttgcgaacggttttcagcctctcaaataaaacaaagctcctaggaccgcccgtgaattctgtcagggatatacgtgaagcatgtaggtaaaatagagatatgatctgtatgacgagatagtatacgtaattatagagcagcctacggcaccgggtattgccactctttcttttccttctataccaagtaacctcttctctgaagacgaagtcgtgttatcccacgagactttggtccatcattatggatatttcagccctgccccgacaaatgccaattttttacaattgggccggaagcgactcgactaatatagcgtatataattctcagattcatacaaagtacaagaatatactttttatatgcctctccacgcgtacaaagccaagtaccacagtattcctacttagaatgggttgctcaccaatataggcaacccctagggcgggcaatcacgagccgagtccgaatatctcggatgctatctctatcgctgttatattccaggctacagtattcaagattcatctttcgttttgtcttgccacttgcacatttctagttggcgtcaaatatgaaagcatggttgggagggtggctaccagacgtgaggcctgttgatatctctggattataattctactggcttcaacaaagtgggttattgtaaagaaacgttgatagaccggaggacccaatttcggctcaacgtccacacttccaaacaccaatagatgatatgaggttcggtcaagttggcgtaattaaaaagcagtttcttcgtagacggggtcgccagatagcgcgaaaaggccgggaaaatacgtactgtatggttagagaagacatacagaatatctccttcaacaaccgttcagttcgggaattttttgttgttcaacagttatcaaatggggaggccgataatgaccgcgacaacgtttagttgtcacaacggtcaccacagaatgaaaatcgcacatttttcttcgggcttctctttaatggtcactcggatttcacgtcattggtgagcagagggtgctacgaacaatagacagattgaccaaagaaatgaattggtggtcacaagctcgatgttgaaagtggatgttcaacgaggtctctaacatctgtcgggccattgaattgcgtttgtgccacctttataaagacgttgaagtagccctttggatctggctagcatataagagagactgtcctgtaagaagtatattgttagaaccctgaatctttgcaaacggataggatggatgccccaaatgaactaccgggccaagatagagcagaccgtcagccaagtgaaatgcctatccgaagtgatgaggcctactcaggagctatttccgattccgaaacccaaatggtaagctacgtgcaataatacgttctatactttggctgaccaccgcattccttcgcaatagcaggaagcaggcccgaagaaacccttgacgatcgagtactttcaacctatattggagacactagccgatcttgatcgccacgatccaaaactcgcctttcaagcggctcgagctgtgggactctatcgacgtgtatgggcttcgtgtgagcccagtggccacggtggtgagaaagtagatcagaaaagagggattttgggggaagcccctatcaaattaggcaacgagcaagacggtctccaacttcgtcctaatgagcagctatgttttctggattcctttgaacgggctctggagcaaactcaagaacgactagtcagcgtgctcaaggaatggaatcaagtcttgagaagtgatctggccgtaatgatagataccgacagatacgcctgagaggctgccagcggaggagtgtcatgtcgacttcagagctattgaatatatcactggaaacaggaaccctggaaataaaacagctcgtatttaactataaaataagctaaatgggtgtgttttccccggtatggctgcctctttggccaacacatcggcggtgtcgttccggggcatttcacaatgtccaggtatccactgtagtcgaatcgacgtgccgtgtgtcttgattataccggcttctttccctataccaaagaagtggagcgccaatggtgaattgatcgatgtaacctatatagaagtgccctacgcgttcgcgttcgtgggtctcaaagcgtaacgcgaggttcaataaaatactgcactgggtcaatttgtggttcgaatcatttcaacaccaagggccaagcggtcttcaccgagccccgccgatccgactcgcaatttcggaggccaaagaggtatgaggtagaatgcgatctactcaagatactcacaacatttacatacattcaacaatacggatccatccaattggtaacggtgaaactgcaaaactttctgtccaggtagcggctccaggagccagctggcggatcctgggagcagggcgcctattctgagtaccttgcgtatacgtagatgaagagtgcttcaatactgaagaacgctatactcaactctcagtacagaacgtaggggcttcctcacattcagggaatcccagatgcgccatatgggtccacccatcgttgatcctcaactcattttgcctcatgtatagctgactcggtgaaacttaacccagcttttgtgttagtgatttctataaatgaagtgttctcgcccatgtcttgcacagtataaggcagcatcgtcgtatccaaaatccaattatcgccagagcaagtccaaaaagagattgcattatctcgttactaggtatcttcgaatcttacagcacagagacccagctcggaactccaactaatgcttttttgccatagaagatgtctcctgattacgatgttgcctttgagccatggaccatattttcggctgcgtcagtgaagcagtgttgcttagcctttgcagaggtgatcaagggactgccgcaaaatcaagtggcaaaggtcaacttcaacttccgcggcatttgcaatttacatagcactcgggcagcgaaggaaggagagaatgtatttgtgctgatttcggggaaggaggtagttttgaaggatgcgtttattgtcaacatatgcgcattgagccgggcattagtcatttacaaggcggcggcgcaggccgatcattttcgctcaagggtatcggtcgaaaagtgggtatcggtcgaaaagtgggtaccggccggatttccagctgcggtagatcgactcgatgatttttttgaggatgtcaacaatcttcattgtgacagagaggcgctgtataatggggtcgtgaacattcttatgggtttgccttgactcatttattgcttgatggcatcgtctcagttccaaactacctcacactgtcccacaatgattgctttgattcaatttgatttgttcctcgcgcttttcgcagccttgccctcagctttgtgcgctgtaaacttcggtacatacaccgcattggtggatcccataatacgacagtgttgtcagacggcagtattcgcaaacacagatggtcaacggtggtgatctcagacagtggtgcgctagtcgacaattgtaaaagtcctttacgtgtactctcgtattgctactcctgagagccagtgtcgattaatttgacccttggaaacagaaaggggagtttacctttccaaaatgaaggctgccattccagtccacaatattcaaagcccgcgacgtaccctcttgtcgttctatgccacgtatcgcgcatacagctcggaggaaatcgccggttctctacgttccctgccttgaccgtccgttcagaatcaatcaataatcatcaatcacaccgcactgcggaggataaaggtggccttggtatccgagacaatatcggacccgtatgattgtgggacgtcttggactagctcgtacatcctgcactgaatctcccccgtcagtcaacgctcatgggatggctgctgccgaaaggatggttggagtcatgcctgctgcgaccaagcgaactagcactcgcgaggatatcaccccacgaaaggtcgttctaagcgatgataatatagatttctctatccggtctgataccagatacctgatagccctttctggaccccagtcagacctcaaccgtgatcccttaccaacagaacatggttgattgcatgaactcgggtacgcctcacagaaagcaacggccgccgttatgatggtggtagtggacgttgatttaaggaggattggtggggatagggtttatacttactgaggtatcggagaagaagccgatcaggtattcttaattgcatgcttgttcaaggtcttggtgatagggtggtccgtgtggtcagactactttgactcgcgacatgctcttgagaaataagcattctaatgtagggtaggttcaagtaatgcttgaagtcatgactttgactgtgtgagtcacaaggcctactgtaccgcattgctagtctaactcaagcgaactagaaatgactgatgcaattatgtcggtgcaaattgatgtgtggatgagatggcaaaactccgcgcacgcgcgggcgggcccgcttacaaagaagcacttcggccgcttggacttttcatactacttgggcttacagctgatcgattgttggaatgggaccgctaatttagcgtgaaggaaaatatattaatccgtgtcaatccgcttttcgaccatctatctactcagagcggtcttggcaaatgtcgagatctctctttaaactaggatatcttcatagcttataatagacgttcataaagaccctgtaaccatcatgtatagtcttatctttatggaataattagttattgggtcggaagctgttatgctgggttcaaaagaatcccggcattcgctgatgtctgacattcactgatctctcggaattcggattaatatattcctccgtgccaagaggcgctacaaattggcggtcccatttcaacattcgatcagcttgccgatactacttttgaattttttaaccacgtaaatgtcagagaatgacatatattcaaatgatttgactaaaattatatataatgaatatattcggcttaagtggaaatcaataagggagaatttataaattgaattgtgattcaagatacatgaaagcagttaatcctcgcgcatcaagtgtatatatataatcgcaaaacttattgaacctacgaattctcacacaatatactgtctacctatcgaatggatagaactattacggaaatgacatatccaatacactatatagaaggatacaccttcattctaatcaattacctaccacattagtggttattgctggcagatgacagttgatgacgacgtaattaaccggatagatttccaaagttgaacgccctgtttaagaaacttacataattcgatggattccgattcccgccgtgaggtattctccttcaccgaccactcacgcactcaccacagcactcaccacagcactcaccacagcactcaccacagcactcatcacagcactcaatacagcactcaccacagcactcaccacagcactcaccacaacagcgtatctcaacactcaccacaacactcaccacaacactcaccacaacactcaccacactcaccacactcaccacactcaccacactcaccacactcaccacactactcaccacaacgctcaccgtaacacttatatccctggctactctataccttaatggctgataccgcaatcaatggcggcggaggaactccatcggatcataaaacaccacagcacaaggaaggggaatacagcacccgatgaggaagaactttcagttgtcaatgctacgatcttgatgattgaatttgcgagatctatccaaattccattagatctttctaatgataatttcttcggaaaacgagactgtaaattgctagaggccttgttctaatatagccccaaacccgggacgattgtgattccttcggcggagactggatggacagccatatgaagattgcagctaccaagcctcatgatctggcttctcgtcgatcgtcactcccctcgcgagagtatggcgctactgtcacactctgatgttaccaggcctctctgtttctggtccatagaatgttctagaagctggggatctcccgcatccacttttccaatcgatatattcttttcgaacccgacgcttcctctctgcatctgctctaccccgatcactagtccgataaccccagtaaatagctcttaagaatctatctcaacttcggacgcaccatatgggctaaccgaaatatagtctgccgattttgcactagaagccgggaaactgattggctcccgagattgtagctcaaatcctaattattctggacgatcgcgtccccttaccgaccgagggtttccgtggttcatcgaaactcgttttttaagatggtggggttcaatagcggatcgacagccccggtcttcattcgacggtcgttatagaccaagatttattggtcctaccattcttgtgttcgcgcttcacaactagggcgtggatcggaactcaatgtgtcagcccctgtacgatagatcactctgcttccaacacacgtatccacttaaatccatctagatccttagaaatctagcatattttctcgagctgataagagtctcgagcatcttaaagagccccggaccaccatgtcatgatctcatttctaggacagcactacgatcctcaacccattactttgaatacccctcagtgctgtttcaatcccaagaaagtgtgattgttcatattccagaagaatatgtatgaagctgtacatacaaccaggaccaatccctcatgctacgcctttattgctgagctgttgaaccccgcccctcgtaatcacataaatcaagctagtttattggaataggttgacaatctgctttaaatcaccgtaacctgtatgccactagaatgctgctcgcattttgtccactggtatctcagcttcctggctgcacagacacgatgtacatagtcccaattacaggatgacgatcgtgttcctggaggccggtaataaaccggtactagtgtcatgcgacctgcaacaaggtctcagcttgccatgagcgaagaatatataatgggtatttcatacctggtctggagcttttcgtttgagttgattcactgccgcgggtatggctaggctcaaccgttgggaccgtttgaagccatttatcaacgcttccttgggcagtatttgtgtctggaagagactctagtgaagccatatcacccaccgagcgatgaatggctcctgatcgttttctgttgcctcgatgttctggagatccggcactagtgcgacggcgcttccgcagaatatggtacttcttccctcgtagagattcaacggttcggactacccggtattgttcataatacgcgtgggaacgggctttccacgagagcgcccgatgggcatccagccaggggagaagatttttctcctcccattctggccagcccattgcgctacgtggggacattatgggggtcggaaaagtggtagtagtggtaagaaacgggtgaacacaacagcagaatgcgaacttgcagatacaggtctgttgggagtatccaatattaagtcaactatgaaacctcccaccgttacatcggaaaataaccattgcgtgattatgagccatggctcagcctggtgggctggtcttggactctcatctcactattcgcactgatcatgtttctagagaccgacaagccctcaattgttgaagtatcgttggatggtggcccctgagaatcaacgacgttgaaatgacaacagcaatgggagaccctctttgtgaacgatttcaccattgtattgaaaatatactcgttgagactgtccttccgttgaagttttttttttacaaatgatgatccttccgttcatgatctagagccgctgatattctattttgactagcaatatgggaaatcaggggcgaaatataatggcctcaacggtgaaagctctgatcatctggcgagtgattttttgaggttcgaatgtggaaaatagacctgacaaattctaattataggcaacaaatcatttcaatttcaacgatacaactctataaatacttgcgcctttcccccattgtattgaattagattcaggttcactcttgcctcagtgtgactcggccgcaggtatgaagggaattcgaaaagtcccgtacactgatcgaggaaattttcggagccgattgcaacgtgcattatcgttgtcttcctccgactctgaggacactcgcagtccgtcaaggtccgtggcaggcgataccacagaggatgagccttctttcccggaggaaaacgactacggcggcgatcaggaaaacagcaacccagccgacgagagtgagggggacccacgggagcggagaatgaagcggaaatgtgatggagacttggaaatacccaaacagactcagctccacggagaaggtaatgcggtagctctcgaatgtgtggcggagtaagtatagacctcatcacagaacatgactatgtgatttgcctgctgacaatttctagactcaatacccgaatgaagtcagttgcgattcacccccgagtgagaacaagaagcgctgatcgtctatataggtccattgagagctcgtcatacgtccaaagcacccgcaacgaaaccgttcgtgacgatttggctggcatctttgctcgattggcgatcgtggagactaatattgggaaggtgcttgaagagcgtccaaaaaaagttacagtggaccagaagagcgggcggtcgcttcgtcgccagcaatgattcgaatgaagctgtacttatttattccattatgttcaccagagcaacatactgtaccttttcttcaatactttctacacccccaggcaatctgaaacctggaaatcccaggataatataaaggcctctgtgactctcattttacttacctacacacgacaccaaatcaatcgggtatggaatactggacacgggacacagcacataagaaatctttgaacttcaagctgctacaagtcgtctgaagataaggaaattgcgtttctccatgggccactatatttagacgagggaatacacctttctcctcagttcaagtattgcaggtcatctgcatggttagtccaccaggctcccacttggatctgcgcaatcaaaaacattcccaagaaatatcaatctagagtataagaaaatgacgaaggagcttgaagcaagtgggcttctacagaagatgacggaaattgacagtattcacagttcggaactattacccttagtatagcataacgataatattgcgtaagtacctttccatgaacaatttgcgcgttggctacattgaaacacattttatccgcataaaatacaggccaggaatttcaacgcagattctttttagaaaagagattgatcttgattggccgcaaacggctcctggtgactagggagcgggccattcgattcggagaggccgaggtgtacttcgtggctctcagtagtgaggccccgctgctccggccagtctgcgtgaattacaccggagcctggcaaataggatgccagtcgtctgttttggagggcatcgattgtattccaaaatcgagtggtcattgctaccatgtccccgtgtgcctgatccaacactagctggatatcattccacgggatcaagtcttgcagagcggtatttgtggactccagctgctgctgcaacttacagatctcttgcccaacccgctgactatcagctaatgcctcgttccttactgtgatagctagctgcaatttggaagtttcttcggccttctccgcttcaagttgttccagcaactgacaatgcttgtgtctctccccgtccctctcctcctgtgctttttgaatctcttcctcaatgctgctcaccatccgaagacattttctatgggtctctttatcatgttttggtcgaggcctttttgtgatgggggatacctagcattgtgagtagagagtacatcaagacatgccgccagggtagtgctggacatggcaagttcagaggatatagacagaaggtagcgatcgggtaccggatgcttgcgcaacccaatcgcatgtttgagagggttccgatcatctttggacccagagatagcagaccgatgggaattacacaaaggtgcagtagcacgatactgtccttcgtccgacctatggcctgtctttctctgagaaggcttggtctttgccatgcttggcatgtaagatcctctaatggacaatggcccaaaggggatggaaagggtgaaataaatataggtagtgactatcgagaagctgatattatataggaatacggacaggcccaggcccaagacttgaagctacggttttactcctgcccaacagctgtgccagaattaggaacagaaaatcaaaatgttgagtactgggcatgagcgcgaacgcgcagaaaccctactacgttattatgaagtatgtgagcaagaggtaagcacaatcatgtacgttgatgcaaacaacgctatctcgtgatagaatggtttaatcggcctgatgtaccaccaaaaagaccaacggctcaatattattatcaaaaaaaaaaaaattgtgagtgttgcccacgttaacgactctgtaaattgagcctaagaaatggcggcgttctttcacaaatgtcccaattccggaattcatgtccgcagatatatggatctttaagaagcagttacttgaggtgagatctgattgacaagtattattgatcattgcgcccttgtcactggcgcaactataaagaaatttcgtactagtatgagtatttatcaagtgtcccaccgatatagatataactaagggacaagaatccccaatgctgccgatcaaacgacaagtccggtacagacccgaaataccataaaagtgcgatgggaactcgaagatatgtcacgagataatcatagacctcttttcatatttgataggcgatcaggggtgtagctacgaggctagtgaagttgatggaatataagtcgtatgtgaatcgagatagcagagcatcgaacgctgaccggtgatcattttacttggcttttcgaggagaaagcgcaatgtctgatctagaaattgacaggtccaattttatcattgactagaaatttccaatataacatggtgatcacaatttataacgtaagtcactgaagccaccggtgcatactatagttatcctgataatctacaacgttattggcctcggcatatattgcgttcgtcaagcacccggcttgagactcctattactcattcgctggcagcccctttcgtaatctattagaacatcttcattgctacaagatcggtaacattttgaatctagatgagtctcgtatcaagatgtagcgcgtactacgggaggcatgcacgcaatgcggctcgcagcgcatttccgtgatctatcgcgttctctctagtccagctcagacctcgctcgctaccgcatctgaggattggctgtcgcgggtatcacatgtgatctccaatccttcagcatgtaacgacctcaatgtcagtattgctccggcgatgccgctagctcgtcaagcaggttcttattttgcgagctaagagtttgtatttcgtggcggagttcatttaactagtgcccgaccctgagttccggcggaataacaaatatccgaagagcatgtgactctagatgtcgaaactcacttccagactacaattagttccgatgagactaactgatagaaaccatatatatggcaagcgcactgatgaagtcacaatggtaaaattctctagctaatcaaaaacaacaacgatctagttttgacaatctggtcagacataatcaggaatcaaatgcataatacacaagtcacatatttcatcggtaaaaagaaagtatcattatcatcctgtttcttgacactatctctgaaatatacatatagcttcacatcgcaaaataccaacagctcacttttgtatccttatgtctcgttacgggatatatataatgcaagcaaaattccccagtccagaagcataagagcatatgctgccaccagtaggacctcaatcaagcttgatttctcagcatcactttggcggtgaaggtgggacgcccggcttcttgacgcctgtagtatcgtatacgccgcgtctataaagctcagcttagcttagtcggaaatcccagtcatagaaccaacttaggacgaatcatagctggcccctgcgcttttcaagcgagatgtaaggattgatctctctatagacgaaaccaagttagcttagatgtaaagatagagctcgcggatctgtatacccgagtccgattatgaagcaatgggaggctgtagagtgcacataaaataagaataaaccaattcacagggagcattataaaagctagccctatggtatccatatagtaaaagctagggagacggcggatgaaaagatttcttttctatagtgatctcttatatgacctatatatgacttcgccgaattagtcgcgatattccaggggctatgttcttcagtgaacgcacacgcatgttgttgcaaaagagactattgccacgatgaagcttcggtaccaggccgaccagttcatcgggttgtcgggatcattggactcccaagtgatctcaaagcttggggcccgcgtggtaagacgagatacagcatgttcaacgtcctcgaagccatctaggtcgtccatcatcaaagtgcaaagggtgcgttaaagacgacttgtggtggggtttctattattataagaaaaactccatttcttttttttgtggtttttatcttatttcatttaattttgccagagctcaggacagtctggatgcgtcggcctggtgctagctaccggtaaccgccatgcccgagcggcaagagccaaatccgatgacccaccgggcaaatccttctccgcggccattataccgttatcgatacaatcctaagatattcggtgcgcatatcgttgcataaaaacgctcggacgttgtcttaactgagtttgttgacatacagccaaaattccgtgaagttcgtccacgtgatacggaggttcacttggcattccgtatccacccgcatgctccttgatatcaatcaacctttcaacgattttccggtccacatctcctgatcaacatattatacttaccaaatgcgtaaattgagttgtgttgtattcaataatatataatctcagcttcatatcttcaataaccccggggcagaaggctaatcgcctagtgcttgagagacatgccgtcttggcggatgagccgtgtcgacgtctcgggatatatggcactgcatttgttgggtgctgcttcatcctatcatatagagtaggttccaccgaatttctgtccataagcaaatccaattctagaagatgttgtggaggtcatcttggaataatggcttacctcatatctccgatcttatacgcgtcaagttttaaaacggggagtcccaattattgcaggcaagatgatatatctccagtgtctactacttcatacataatatcgaaagcatacatattgaaacctcatcttgaataaattgaaccgctctccagggtccgcgaagactaatgaacggccaagggatcgacagaagtacaattgactaaccgaggtttccgccataattccgttcggacagaaactgaacgctcaatatgtcggtatcgctgaggtcttagttgacctgcgcttgtatccatagagaagactgaacagaagtgatcagcgcggaagggagtctgattggaactagtgtcgcaaactgagtgtcaccacatggacggaggtttgatcagcggtaggttctacaggcctcgccaatcgcaggcctttgtcgagtttcgcggtcaagaacacgttcttgggctcttggcgggagcccgattcggaacagagtgtgatgagctccacagctcacctcagggataaaagcaaggctcattcgtctctggaataatgcactcagtgcgaaaacacggacgcagaaaaccgcagtactacgcaatgcctcttaccaaggggaaaacagctttcgtgacgggtgtgaacgggatcagtggccatgctatagtggagcatctgataagagaacctgaaactgagtggtgagagctgtccacatcctgcaattggtttcattccagtctgactggcctcccaaggtcccaaatcatcatttcttctcggcggccgttggcaactcactggatcgatcctcgtgtggtgtttgtggccatcgatctcctcgaccctactgagaatatcaaacaatctctgtcgacactggtggagaatgtcacgcatgccttctttacatcctatgtccacacagctaacttcgatactctgcgcgagaaaaatatccctctattcgccaatttcatcgatgctctcgatgagctgtgtccgaggcttgaacgtgtctgcctgcaaacaggtgggaaggtgagacccttcacagcactgatacagtcctgtatgacacctaactatctatatagaattatggcgttcatcttgggcctgttaaataccccctagtagaagatggccctcgttacacggacaagaacaatttctacttccaccaggaggactacatgttcgacgtgcaaaagaagagaaaatcatgggattacaacattattcgtccgaatggaatctttgggttcacacctcatggtgagtggatttaccacgtttcctgttggaccatcttgaccaaagctttgaattaggttctggcatgtccgaagtattgtcactggcgatctatttcttggtgtgccgggagctgcaagaaccggctcgtttctgtggcaatgagttcctgtggaccaacgttgacaacaaatcatctgcatggggcctggcacacatgtctgtgtgggctgtgacgcaggttcaatgcaagaatgaggcattcaactatgtcaatggggatgttttcgtttggaaaaatctgtgggctgatcttgctggctatttcgaagcagatgtgaggccctcctacggaatggatcccccaatattgatttccgagatacgctaactcatccaggcccctgaacctaaatttatgaatgctgctggagtttccgacaagttgacaaatgagttcgatatcctcgaatggtccaaggataagaggccggtctgggaaagagttgtagccaaatacggtggtaaggttgaggcatgggattggacctcttgggactctgtgatgtgggcaatgggtaggtcctggccaactatagcgtcgatgagcaaggcaaggagattcggatggactcgttacgacgattctcatgacaactattttcaaaccatcaggagcctggagaacgcagacattctgccaaaaataacgaagcggtgagcacctagttcagccagctaagatcgtcgtcccttttgttttctttctgaaaaggaccgtgtgattattgctggatttaagctgaatagaccaatgtagtgggtgcgtctcttaagtagacccggtcgcttcgtggtgggtagtcaagaaggtggtaaccggctatcttcaccgtagggctcttttcatccgactgcaggcgatttaggcagaagcggtagtgcaaaagccgcaagctctagtcaataacgagttccgtaccacatcattgctaggccggtacatagaactcagtcttaagagataccaaattgaagaatgtttccaagatggggcgaggtccacaatacccgcaggatcctcacgagctcagaagcgctcaagaatgttccgtattgtgaagatatgagatcatttctctctagcaatcaactcaatatcaaagatcccactcgggaaaacatgcgagataattgggacacgcaaaagatagtgaacagtcaggccagcactccaggtcttcctctactggtgaattgacgctaatggccaacgaggagtcaaaggtgtctttcaccggcgatcagtcagacaaaagtgacccggaatatagcaaacaggagtatgatgggctaataagcagctggaactgctcggtagccgatgactgatttgcttggccgtatcttttgcgaaggtttgttttggttcaacaagctctactactctaggcagtacggtcactgttcataagtcttgacaagcctctagctccgcctgtataccgctcatattaaacattgttcatggacttcaattataatatatatattgtattgttaagagcccggggtggggtggccccgtaatattggaaacttagtttatcacaaagccttcggatcttaagccctacctaatataatcagcagggtgtggagcctgaggggttcagacctttagagccaagtgtgagccaaaggtacagatactgttcaaaggcgggtgaggtccctccgtgaggaggttcgactattcaaacaccccccaccccaaaaccgaagccggtggtatgcctttcataaatcttaactacattcccttctgtgtgttaatcatggctccaaaaattactgttgtcttcgtatgtctgccattaacccctcgttctcgtgtttccctagattatctcctttgtagtactcgctccgcggccatatctagaagcttgctgaggctgaaaagcagggcattgagtccgccggcgggcaggctgacatctttcagatcgccgaaacactctccgaggagatactggccaagatgcatgccccgaccaagtcttcctaccctcttgctcggccgaacgatatcctgaagtacgatgctgtcctctttggtatccccactcgcttcggtaattttcctgtctagtggaagatcttctgggaccagactggctcgatctgggccaccggtggctgttggggcaagtacgctggtgtctttgtctccaccagtagtcctgggggtggtcaagaatccactgctctatcctcaatgaccaccctcgcccaccacggctttatattatgtccctctggactacaagcccgcaatttccctcctgaccaacctccagaaggtccacggtggtagcccctggggtgcaggtactttcgccggtcctggcggctttcgccaaccttctgctctcgagctatagattgccgagacccagtgcaagaatttcgacgaaaccgtcgccaaggccagttagttactgcatggcagagcccagtgggttcccacggttgaggctgtaatagttgatcattatgcgaaaaacaatccgggcagtctgtccagcaacagtatggcagctaagaaccagtgagatataagacgaacagcaaggcgccgtgcgctgttttcaagaaaggtgctgtcatgtggccgggaccacagcttacatgatttttttttgttggaacgcggtcgttacagcacggactagtacaagcagagccaattgagtacttgagagtgtgatctctacatactgtagaaagtgcagattaaatggggagttgagcttagtaaggtccttgagagccttagggtcatcaggcagatgggggcctgaatatttctcgggcgcactagttaagttacggtcctcgtttgtcgacagaaaatttcaaactattgactatattcgttactcgctattgcgtgttcgctttttgtgagtggaactgcagctctcatgtggctgatgcacttcccaaagctcagggggaactatccctggctgatcaataaagtctttctgtaagttagcaacccccacttgagagtagtcttccgcacgatccagtaaaacccagacccaacccccaccccccaaaagggctggggggcccaatgggggtnnnnnnnnnnnnnnnnnnnnnnnnnnnnnnnnnnnnnnnnnnnnnnnnnnnnnnnnnnnnnnnnnnnnnnnnnnnnnnnnnnnnnnnnnnnnnnnnnnnnnnnnnnnnnnnnnnnnnnnnnnnnnnnnnnnnnnnnnnnnnnnnnnnnnnnnnnnnnnnnnnnnnnnnnnnnnnnnnnnnnnnnnnnnnnnnnnnnnnnnnnnnnnnnnnnnnnnnnnnnnnnnnnnnnnnnnnnnnnnnnnnnnnnnnnnnnnnnnnnnnnnnnnnnnnnnnnnnnnnnnnnnnnnnnnnnnnnnnnnnnnnnnnnnnnnnnnnnnnnnnnnnnnncaacccagacccagtaatgggtctggggccccaaatggggttacaaactaaacaaacatgctcaggattccaattgtataacttacgcattttcttgtggtaattttaagtattcactttacttgattaaagcgaattttattgatgaaaagggtgaaagagaagcgttggttaagaattcctatatcaagctaatggtatccaaatatatcatcttcccggctcttacgattccgccctggtgctcgtgtctgtgtacaggttggggataatgatggtgagcaaagacggacatgttcacttgtaggcgaggaacccttctccggtgtatcttctggttcatcccccggttcatcctccggtcctctgtatcgctaattggattgacctcaatcttactaagcttctcctccctttcttcttttgccgccttaagctcacctggcgagattctcgagaagcttcacttcctgctcctctatatcaaatttcgtcgtacaaagaaacattattaacccctcaatcgtctctgttttcattctaccacgagggtagtgacagatacctcgagcagtatcaaagaggtgtttgattcccgcgccagttgccgggaatgagagtacatctcgcgcaagggcagcaatagctggaaagcgagcttcgtgctctttccagaaagtaagcggtctaatacaaatagtatctatctatgggttagtatcgttatagtatacaatctttatatttacttactgctatcaagatattaactgatttcattagtaatagctcgtggttgtatatcccttccatcaagtatctcttccagtcttgagcctggccgaactataatcggagagctttgtggatcatgaccactacttctaacttgcgcttgatatggaataagggcttgctcaaaagcaagccgataggtgtcttgctatttctgatcccaatcgctggagaggaagaatttgaatttgttcactggtgcaagcattgtactgattgcatagatattttctcgactatcatcagcttgagagtaatactcatcaaacttagtccgaccagcttcaagtgcttctaacatctgtttctcttatgggacgcgctttcggtgtagctgtgcctgtgatcgctcaagatgatcaaacagtttgttatagagcttaaaaatatagtgggcagcgacatctcgagtttttgatagctgtgttgtgtagtcaagaaaggctcagtgatatagagaagatagtcgatctgacgccactcttgctcgcttaagtagcatctcctcacaatcatactctgtacagaataaagagaaaatagcacgtagcctctttgcccggcgaagtataaagaatgtggaactccatcgtgtcttcacatcttggattggaacaatctttatatttgttgtctgaagattgtaaaatgtctctcggcgctggagacttgcattaacgtaaatcgcaagataccggactttgttcaatgtggaggagatctgacattgcttcgcattttcttgggctagccttgactgcttctccgtccactttgtctcggctgattcattcaatggaactgccttgatccgagtaagaagctgatttaggcagagctggataacatgtgcaagacatggtattcgggcaataataataatatcatctgacaaagcctgttggagagaagtagttaatgtcttgttgcttgatgcattatctgtcgttaacccgaatactctgtcttcgatgttatgctccgctagggtttctaacgtaattcacaagcgagccgccaccacctccaaaaacgcgtccatgaattagcacttagctagttcaaccacccaccatgccaccaatatgctctcaatcctctacaaattcagtagagcaagagggtaaaatcttactagctatccaggcttttcaaaatcaagaatttaccaatatttccaccactgcccgcatttttaacgtaccgcgttcaacacttcgggatcaccttagtggtacaaaacaccgcgcgacttctcgcgctaattcatctaaattgaccgcaattgaagaggaatctcttcaaaaatgaatactctctatggattctcgtagatcaaccccccgaccctctatgttacgagaaatggcagatcttctcaaacatcgccgaacgaccccggttatttcagttggtataattgggttacaaatttcgttaaacggcatcctacccttacatcccgattctcgagacgttgtaattacgagcgcgcgaaatatgaagatccaaaaatcattggagaatggtttaatcttgctcaaaaaaccattattcagtttggaattaacccggacgatatttataactttgatgagaccggatttgcaatgcgattaaccacgaccatgggctgcaccaaggtgaagtgggtgtggaaagacaggacataagataaataggtgtccagataaataatcctgtttagtttaatcaatttaatggcgttctggttgaaatatattcgttagaaaactatactcttgggtagggtggcggctcgcttacagtggcggctcgcttaccgattacgttactccggattaattgcttagataataccatagttaagccttggaagctcccgagtctggagaagtctccctaattaggcctagtcccaacttatactcgctaattctgctaattctattggcttgattcttataccgtcttttagaattctgccggtctaagtatgattacataatgcaaaatgaagccttacgtaaccaacaatgccaagacttagttacaaggcttgtagcttcttcgactgtccaattataccctggcgcttacttagcgggtacgtcggcccatacgggccagttgtgcaagtgaccctcggggtcgtaacagatagactgctcaataacagccaaattcatgaaggagtatgtctctacttgtcctttgaatacgcacctctctgattacagatcattggatcgccccaccgctggaacttgacttgtgatgcctgtcccctgagactcactagagaggattggatcctggctgggctgagctgcgacttcgcgctgaacttggtctatcaggtattgagtcgcaaaccgcaggcgctgcggaccacggggtttttgggctcgaagatatgtacatttgatacgagaattccggcaaccttggcatgggtgaccatcccggcatcggatcttcgagatttcagtataaaccgtatcctatattctaatgagagtagtgcgatcccatcacaatccttacctttcgaatcttacagccatcgcaggcggtcttagttgcgggtgatctggcagacatggtggcagagacgctatgcggggtacactatacgtcggtcttcggtgttttacaactgcagaacttcaaaagtcgcatgggattctgccggaacggaagctgttgattgctcaagtagattccattacaaagaacggtgtcatcaatcgattgcgtgactctccacggggcacgccatagggactagacccacctagtctggaccgtggcaaaatgttggcacgcgatgattcgtcgcattcttttgaactagggaaataagccaataatcgagtggataatgaatgagaagggtgtttcctgggaagactgctagaattgaattgaatcttagttgatcccgaggcacatttttatttcaactagccgacagtacgaccgttttaacactgcaaaacagccgataccgagcggttgtgaaagttgcgatgaatgcagaggtatatagattagtataatatgatttccgccccagatttcatcgaacttcggggttaatggcttccgttaccgcgagtactagaagccgctaccttcccgttgtacgtgaagaagtcgctggaataaggagcttttgaggccaacgaagcccatttaatcagaggtccaacctttttgactaacttcaaaatgccaatcgttggggtcatcgaaccaagattcaataaagactttgcctttaaaaatcatacaggaggaagcgcctaccccgaggcatttgtacactaaattgcggttacctattctcgatttcaggattataaaaatgctcgccgaggatagtattcattcctcgtaatagccttcgccgttgcggttaatcctaccgcgaaaccggtctcgtcgaagttataaacgtcgtccgggtcaattccaaattgaatgatttgtttttgaacaagattgagtcactatccttcaattcgaaatcgaccccgatgacgtttataacgtctcgagaatcgggataacagggtagagtgccattgtacaaaatgtaaccccatttattaccgaccgaaataaccggggtggttccacgttgttcgagaagaagattcgccatttcttgaacagtagaaggccgggggcagacccacgtagatccatagagagaatacatttttgaagagattcttcttaactctctgtcgatttatgcgagctggcgcgagaaatcgcgcggtttggaggccccgtagtcggttttgaagagtggaacgcggtatgttaaagcagcgcgctacctcacgaagtgaagaaaattcttgctttttcaaagcctgaatagccaacaagatcctaccctcttgctctgttacatttgcgggggattgggagcgaatcggtggcatggtaggtggttgaattgactaagtgctaattcatagacgcgcgttttgggtgggatggccggctggcctacatggccgattcgcttgccgattacgttaacgttaagagtagaggatggtcagccgataaatgatgtctattaaagatgcccattagatatgtctgcaaacatgcgtcacacttaaaattaccataaataacaagtaactccagattagacagcaagcaacaattgtttgttggggacctatttcaagagcacagacggatattggtagtccaaagatgctacatatgagctcaagctttggacttgaaacaccttatctcaaacattttcaatggcgcattgtgcaacttgagctatttcttgcaaaaactggtccaagggctgaacgtcaagaaggttatccggagttgaacgagggactgacaactctgcgaggagccgcgaaacagcgtgaaggaggttactgtcgtattgcgccaacggatgcttgggatgctcgagaatattgcaaaaaagtgtaattgaggcagtgaccggataaaacaaaacaagcctgcatgatgtagtcagcttttggtacaaatcacgttattacaaagatcaagttctccacgaaaaggaacggaagccagaccagagacagcttgggaactgaatcacatgacgcgcaatttgcaggtatcgcaaagaagatcggctagcctcggtggcaaggaatgtactggaactgataccgggactagtcgcattgagtgccttctcctttcccatgcaacggcttgtcgcctggtggataacagtcacacagtggtgatattccagccgtatgatcaggctgcgtagatccaattgatcttgatcccagtgtgaaacttcagaaaaggacagactcggtcggtatcgttccggaaccgtcatccgccaggcttccaaatccatatctaactgccggacagctgtcaagagctccgcatcaggcttgagtaatgctgaagccgaatacagcgacttgaatacccgagacttgacctggctcaatttaatgtcactaggaaatatcctgcagggatgaagtctctccactgtttctagatctgcgcacagatgctccacttcgtatgcaaaggttctcaagtcacagaattcgtcaataagcataggaggttgccgcgttcgaaatgacatctccttatcgatagtataacaaatccagaacaaacaccgtaattgtcttctggtgcgaagcaaaccttcagctgaatcagtcttcgaggaaggaacaaagatttgattatgcgcccgagcgtgtaaatgaaatgggtcgttagagaattggtcgtagccgcagatttcagatttcccgagtagaattgatatgccaacttaggtatagttagttttaattgcaggccataagaatatggagaaagggcttaccagcatgacgcatgtttggaaggcctcaagcgtcatttcctcaagaaacacagggatactttggttaatcttggcaatgtagccacctatcttgtccgtcggggtcaaaggaacgccgatgtcaaagaaatgagctagtatcaaaaaagcgaagatacatgtcctcgcgccggtgattttggggctatcatttgaagacatgtaagcccaacggattgtctccttgaataaaatagagtccaaaaccggtaaaacccctcgaaacacggatttctggtaggactcggcgcattgctccacaatggattggtcagggagagtcaatctgttgaaagaccccatttccgacggttctgaacttgaaacagccgaagatcggtcgttccgctcgaccgtgtctagagcaaatttgcttttcgacaaaagtcggccagatctagcttgaatccatttttgcccttcagccgagaaaagaggaagtcctgtggcaagattgatcatgccaatctcacgcccagcagaatgaatcactccactaggttgagtcgatgacagcgagagtgttgggcccttaccaacgctggcctgtgactcgcttttcaggctattacctgatgacatcaatttagtgacatggtcgcactagctgcggggtcaggataatttcttctttcctccccattcctctctaaaaatagaggaaaagaaaggaacaagacaaacaaggaaagataacattattgcaaagaggttgaagaatgactcactatggctgcttgacaacggtgccttaacggtcttacgatgtaaagtagatgattctctgctatgtggtattagtacatgtgcaagtgtttttgcataggattgtctgttcctcgataaagagtgccttttctggcatctgttgtacgtgcaatggacctggtagtggcggcaccaaaagcagatcggcaatacagcattacatctcaccttaagataaacgattcgacattagtgaattaattttatcgggcatggtgatgcagtgtattgtattaccttgcgtttccaacaggaatcacaagccgagattttctgtcctcgatcgcctcgacgttccatggccacaaactcagcagggtccgttagttcagaggtcaatgcgacaataacgaagctgcatttatgtttgtttgcttatttaccggaggaaattagcttgaatgggtaccgggaggttgcgaaggaacacgtggataaatagaagagcatggaggagagctgggctggataccgcctaccagatccgatactcttacgtgtcattggcagattgttattatcctgcacaggatctccgggagagtagcttactaagcagcaagcgtcttgagtttgtggtcggttgcgaggaacatagggcgcactagcacgtcattgccaatggtcagatcggacagttcttgaggtatggtttagtttagatatgagagaacaaaaaaagggggttttgtgcttcaatagttgatgccttcggaactacccgcgacgtcttgcccaacaaccatgagttgttcatatgattatgacttccgctagtggtcgtcgttaggactgctcttggaatattgcggcaagattagtggtatttttcttgaagaaacgtttaatacaccgaattctaacgccgatctatctgattttgcgaacacaactcagatctctgccgccttgatcgcacatacaccaatgagcggccctataattgcaatgctaaggattgcggcgaaagcctcgcgcaacgcaacaccttgacagcatgctcgcagactcattgcgtcgaaaagcctaatatttgtgatcaccagggctgcgatagagttgtttcagatatgacgcaccctagcccatggtcataacccatacattaactatcgctgacgcttggtctgtcatcgcctaagcgacatgggaaagcggcattacatctgccacgagacgaattgcgaatggaggtaagcaaaatgtaaaccattgttcaaagaaccccaccgatttccatttatcgcggtctttgagtacccccaaatcccagatgggcgcaaccgcctctaatcgtgcaagttgtcagccttcaagtggacgggtccaaatcctctgtccatgtctactcagtctagcgacattttcctacacatgtaagtgttcgctgcccctaaagaagtgcaccggatagggtttcggacagcacggttagattggacatctggcgagagtacaggagagcatctgttcttcctgccccgagttgagacggccacgtagaatctccatcgggtacacgaacagttgctagacactatctcccggcatgttctttggtgcaataggcactagcttttgactgtccctgtggcctcgtatggcatctctaccacaacccagtcacttgacactttcttcgctagctgcgctaccacgacggtatcccttgatccgaagttttcaagtgatactggcccataacatgtgggtttgttcagagtccagacacaaggaatataagctgcttttcatgctgtagttctccttcaattacaacgtcattgaagtatttttgcttctaaacaataggaaggacaactccgaatagccgatccctcactcttctcttgcgttatccatgaagcttccaaattgcgtctggaagggggatttcagttctcaagtacgcgtatcacccgatcccggaatagttccaacgcctgttcgagaaagcgcagccggaatagctgcttgtcgtggcgaagctgaagaccgtccccctctttgctcagatgtgtgccagcctctttcactatctgaattctctgctctagcttctggccatggatttgcttggacacacatggctccaataggcatctatagagtccaagaagtccagctgctggaaaggtgaacttgggatcgtggcgttcgaggtctgctagcactttcaagatgggttgaaagggctcgttcgccagggtatgtcttgattctgcttcctgttacgaggaagtgggctgcaatggtcagccagaatatttgaagttcctgtggtttgtctttttcgctaagggtgggcaattcactgggctgctgatctccttcaatttcctggtctgtcgagctgtttcgtgcgtccattttgtccgcaggagaaggtcaagatcttggcaggaccgtttccatcggggctttatgtcccttatggacaagtcatgcacacgcaggtggctatggacttggttttacaatcaccactataaacagtcaagttctgactggagtttttttgcattttagtgggctgttgacaatgtattcactaataaggatcgtcggttggggaaactgatcgagcctcacgatcttgagggtcaaagtacgaacgcttggtgaagatatgtatgtcaattcgacacctcttccaaattcgttgaaagcctcatgaatccgacaaataaaacgttgtagaacttgcagtgatcaaacaagaacttcaatgtatcttcgaaatttgagtgttggcaactatggctaagcttcaacgggttgataggtcgaacagcttacatttgaccgtaaccacgctttttgcagtctagacagacagatccgcacaggtcaacacaataaatgcaacactaaagcgaaaaaaaaaaatccaaaaatccaaaaattcatgatttctcgggatgaaactgtgggcggtttccgatgattcatcgttagatcgctcacagatgaggtgatcagaacgcgaaatataagcctgccattgcggatggaatatcccccacaaagccagttagccaacgtttcttgacagactcagcatcctttttcttgataccactccaaattgtctctctcgctgaggatctaaaggcatcaagaatgtcgttgcaaatagttgcggtaaaaagaagacatgggcttcaacaggcctcaattacgagaggcgcccccaaacccttctaccaagcagcgcacttgcgcaaaaagactagccgacaagcctataaatacgtcgtctgcctccggcaattcactttacaatttattcacctgactctgtaaagccgagcaagtctgtgtctatgaaggggaggtatcgactttcaatactcgacggccatggaagccatttaacccctaaattcgatcaaatttgcgaggataacgatatcataccaatttgtatgccaccgcattcttctcaccttttacaaccactcgatatcggctgttttgcggtcctaaaacgatcgtacggtcggttggttgaaacgataatacggcataggatcaaccatattgataaacttgattttctcgaagcatacccttctgcacgaattgaggcttttaaaccagagacaattaaaaatagcttctcggcagccggtttattaccttttctacccgatcaggtactttcgaagctaaatatttgtcttcgtacacccccacccccaagccgggatagcgattgggacccaaaaacgccttcaaactatattcaactacaaaagcaagcttcgtcaatcaaagcattacttcgtataagatccagaagccctccgagtccgctaaattcagcgatcaaccaggttttaaaggcatgccagatcactatgcaatccgccgcatttctcgagaaagaagtaggcgatttacgcgccgccaacgagaagcagaagcaaaagcgtactagatctcggaggcatatacccgccgaagaaggcctttcagttcaagaaacaattgaagcacctccccccggccccggcatgcctggagaatctactattcagccacgtacgcgggccccccccccgggggtgtggaatatgcagaatgccagggcatagaagagaaacatgtctagatagacgagttagttagttgatttaatttaatggcgttatggttgagataacgtaatccactaccgagtgacgcacccccacccaacttcctgaattcaaatgcatttatctcaaccaaaacgccattaaattaaataaactaaaatcatcatctatctggacatgtctctctcctatgtcctggcttcctacatattccacatgctcgtctagcctgggggggcggccttaaaccttccgaaacctgctcacgatagttgttgatacgcgctacttgggcctcaaatgactctgaacgtagctcacgaacatcctgaactgagagatccccttcgtggactatcgtccttatagatcgagttcgcttttactttttcttctcgttttcagcgcgtaaatcgctcacttctttctctagtagtgcggcagaatgcatcgtgatctggcaggcttttaaaacctggttgatagcggaattgagtgggctaggagggctccttgatctcgtacgaagtagtgcttttattgaggaggcttgcttttgcaattgcacatagttcgaaggtgtttttgcatcccaatcactaccccggctagaagggggggtaggggttcgaagacgaatatcaagcttcgaaatcactctctccggtataaaagggactaaaccagctgctccgaagctgtttttaatagtctgatttaaaggcttcaattcgtgcgagagggtatgcttcgaggaaatcaagtttatcaatatgatttatcccaacccgcatttttgcttcaaccagccggccgtacgagcgttttaacaccgcaaaacagcctatatccaaaggctgtaaaaggtgagaggaatacagaggtatacagatcggtataattttgttttcttcacagattttatcgaacttcggggttaaatgacttccgtggccgtcaagtatcaaaagccgatatacccccttcatacgtatagaagtggtaggaataaagagctttttcaaccagcgaagtccaatttcatcagaggtccatccattaggactaacctcaaatcgccaatcgtccgggaggccgtcaaaccaggattcaataaagactttgcctttaaaaatcacacacagtggaagggcccaatcagcagcatttatacacttaatagccgtcacccattcacgatttccaggttgtaaaagtgctcgccgactgtagtattcgcttcttataataaccttcgcagtcgccgttaatcccatcgcaaaacccgtctcattaaagttataaacgtcatccggatcgatcctaaattgtaggatagttttttgaataagatcaaaccactcctttataatttttggatcctcacatttcgcacgctcgtagttataacgtttcgagaaacgagaggagagaagaggacgtcgtttaacaaattttgtaacccaattttcgccaaccgaaagaaccgggctagatccgcgcttttcaagaagaagattcgccatttctcgtacagtagcaggccggggggctgctccacgtagatccatagagacgatccatttttcaagagattgctcttcaagctcagtcagtttatatgagttagcgcgtaaaatcgcgcggttttgaacaccccggaggcggcggcggagggtagcctcaggcactttaaaacagcgcgcagcttcacgaattgaagagattttttcattcttaaaatcttggatagctaataagatcctaccctcttgctcggttgaatttttagacgatcgagaacgaattggtggcatagtgggtggttgaagagagagggttatattaattgacgcgttttgggtgggggtgcgtcactcggtagtatgcgtcactcggtagttaaatgcatttaaatttaataggttgggtggggtggaccactcgtttgtgtggaccactcgtatgtgaaatacgttatcgtaatgtaatctagttgtccccgctacccagtagtaccttgccggaaagttgggcttcaccgtctgatagattcacgaatgaaaattttagctatattaggcctagtgtcgctataagtacaatttgagagaaaaaaaaatgaacaaggaaaaaagagttaaggttccaaaattattcttaagtgaaagtaaggatgtctttctctgaaccaatcaggaaataggtttagaaacggccattgaagacctcgtagttaacagagcactgattagtaaatcaggatgaaacgccgaaaattgaacggatctaaatagtaaaccgaaaccttaactcttgttctaggctgtttccctttagacatacaaccttatcgcattatgtccgattatttaacattcatctttgcccttctgggtgcaaatactcttgggtaaaatcactgcaaccctgctaagatgttaattaaattacctacttacatagacttcgcggaataccagctatactagtcagttttgtctttcactaacttaccacgcttcatctgatatgtatacaacgataaaccgttagggcttttataaccctgaccatggtagccttagggtctaattctagataccaattcattttttcataaattggtttatctgcgtatttacctcctaattatattaataaattacatagttaattacattatgtaatttattaatatgttacttgcatctaaaattgacttgctgacctatcatgcaaaaggtacgctcttattatttatttatttaagttttcacaaaaggtgaaggctcggggagagtcgcaccaaacctaccgttgtgtgggggtagacccacctagggtgcctacccattccgcgctgcctttcttcctgctgcctttcttcctgctgcctttcttcctgctgcctttcaagctgcagccacagattttatctctgcgtctccctaacatttgagcgagacaccggttcctgtcttgatcattttcaatcgtagaccaacaagtcgtcatcctcaacagttgccaacggaatgaacaagacatctcacacggacgagcccctcgagggtgacggctacaaccagaaccccaatccaaactctaaggacctgaccacgaatgaggactttaacggtcttgtcaacagtcgggccgtgcgggaaagcgactcccaagcactgtcaaacgcggcctcgaacgcctcaggggaaatagccagccatgctcctatccaaaaggacgggcacggcaaggccacctatcggctggctcagcggtcaattgatcgtggccagccccctgagggtggtatgcaggtacctgtaaccgcccaccccccggggtttccgccagcttcggctggtggtgacgccgaccctggcacgctgattcagcgcgcccggaagatgcttgctacctttggctccttcatcggaccgggctttatgatttcggttgcgtacagtatgtccagggcgctgtcgtcctgcagtctttcccttcacctcacttacatatgtgcacctagttgatccgggaaattactcgaccgacatcgctgcaggagcctcgtaccgcttccgcctattgttcgtcgtactcctctccaatatatttgccattttcctccagagtctggcaatcaagctcggtaccgttagtggtttgaacctcgccgaggcatgtcgtgcatttctcccgcgctggctcaactatatcctgtacgcctttgccgaagctgccatcattgccacggatatagcagaggtagacccctagtttgctccacgtttcgtatgttgtgcgtcgacaaatgctaactggccaggtcattggatttgctattgcattgaaccttctgattcctaaggtaccgctggtcgcgggatgcgctatttccatcctcgatgtcatggtaactctgttcttctaccacccagaagggtctatgaagggcctaaggtactttgaaatttttatcatttgcttggtactcgctgtggtcgtgtgcttctgcattcaattgtctctaatccgtggtaccatgcccggggaagtcttcaagggttatgttccgtcaaaatatctcatcgagtcggaagcgtgagttcaaaattttcctccacccccttcatctttatcctaatgtttttccagtatctaccaggcctgtggaattctcggcgcaacagtgatgcctcacagtttgtacctcgggtcgggcattgttcaaccccgcctacgcgaatacgatgagcggagtagactcttacctcgtcagcttgcatcaggatattcggttctagatgatggtatcgacaaaggttactacgtcccgtccttcagcgcaattaagcactcgctcacggtatcgattctcgagctggccatttcgctcttcacatttgccctctttgtcaactccgccattcttatcgttgccggtgccgcgctatacaacaacccagatgccctcgatgccgatatatttggtattcacgatctgctttcaaagtccatttcgcccgcggcaggtatcatattcgctctggcgttgctcttgtcgggagtctcagcggggattgtctgcaccatcgccggccagatggtcagcgagggcgcgctgaactggaatatcaggccatggctacgccgcctcgtgacccggactattagtatcacaccgagcatcatcatcgcgggagctgtgggtcgtgaggggcttaatgcagcactcaatgggtcgcaggtagcgctgagtattatacttccgtttattaccgcgccgctgatctactttacctgccgcgataagtatatgacagcctatcccggcaaagcgcgttggcgcatggctggtagggatgacgagagcgacgtggaccaagtaattggggagggagccgagctcgaacccgaaggtgtcaagatgaccaactcgtggtacacaatgatcctcgccgtcttgatttggctcttcatgtcaataatgaacgtggctaatctggtgttcctgggcaagtaagtgccacagtaccgcaatggcttggtggggagcagttgcaggagggtcactgacccgaggagagggatatccacatgacaattcagtttattgctcccaatcggaatcagaccgtgcgcacttgtttcgttggtacggagcgcaagtatgcgttgcatgggcggagtaatggaggattgatttcagggatgacgaaattcggaaaggagaaggcgagggaggatagaagggctcatcataagaaatagcactctcttcgtcctgagacatcaatatctagcaccttcatgtatccaatccgcatagtaggatgctgataatgaaaagggcctaagggaggggagtgaatgagcgatgagaggcactggcatgtgggatccaacacatgaatattcaatattctactcaatcagatatcaagctatgtttcgaaactagccaaatcaaaaatagaacagtatctatggaaacgaaataaaccgataatttatgtaatgatgattatacgtttttaattggagaatcttcgagttcgtgttccgctgcttcgtcatttgcctccaaaactgtactaactaggcaaccaatgttttcacgaaccttctcatctttgatagcgtatatcagcgcgtcattgacgaactgagccacgatcttcgagatcacaacgatatgttctcgagcagtttcagcccattacaatgattacacatagaacagctccgcaaggagagcttggttgtagttacccggtgactcttggcccctcgtttgatcatatacctatattaagtatcacgaaaagttttcctgcgagcaaaaagtcatacctatcgaattcagtcaaacatcccctcttttgtcacaaaatgttgtccacctttgtctttccggcatctgggtggtccgtacatcaacccaaattaacgtaattcacatacgagccgccaccacatacgacccgccaccccatccaaaaacgcgtccatgaattagcacctagttaattcaaccacccaccatgccaccaaaacgctctcaatcctctaaagattcaatagagaaagagggtaggatcttattagctatccaggcttttaagaatcaagaattttccaatatttctactaccgcccgcacttttaacgtaccgcgttcaacccttcgggaccgcctcagtggtatacaacaccgcgcgacttctcgcgccaacttgactaaattgaccgcaattgaagaggaatctcttcgaaaatggataatctctatggattctcgtggatcggccccccggccctctatggtacgagaaatggcggatcttcttcttaaacaacgcggaaccaccccggttatttcagttggccaaaattgggttacacattttgttaaacggcaccctacccttgcatcccgattctcaagacgttataattacgagcgcgcgaaatgtgaagacccaaggattattggagagtggtttgatttagttgtttgatctagttcaaaaaaccattcttcagtatggaatcgatccggacgatgtttataacttcgacgagacgggttttgctataggattgaccgcaacagcaaaggttataactagaagtgaatactacggtcggagatcacttttacaacctggaaatcgcgagtgggtgactgcaattgaattccagatgattggcgttttgaaattagtccaaacggttggacttctgatgaaattggacttcgctggcttcagaaactgtttataccatcgactttatcgcgtatggtaggaaggtatcgacttttggtactcgatggtcacggaagccaattaacccctcaattcgaccaaatttgcgaggaaaacaatattataccaatttgtatgccaccgcattcctctcaccttttacaaccacttgatatcggctgttttgcagtctcaaaacggacatacggtcggttggttgaaacgaaaatgcggaatgggatcaaccatattaataaactcgactttctcgaagcataccccactgtacgaattgaagcttttaaatcagagacaattaaaaacagcttctcagcagctggtttagtacccttttcacctgatcgggtccttttaaaactggatgtttatcttcgaacaccaaccaccccccctagcaggggtagcaattcaagccagaattttacaccaaaaacccctgctactgggaaagatctacgtcgataggcttcgtcaatcaatgctttacttcgtacacaatctcgaagcctaataagtccttccaaacgtgcattaaaccaacttatcaaaggctgccagcttgcgatgtatagcgctattttactagcgaaagaaaacaaggagttacgggatgaaaatgagaagaagaagcaaaaacggacccgatctagaaggcagatacccgctgaagaaggcctctcagttcaagaagcttctcaattgattactgaggtggtggaagcatcagaagcacctctatacctcccgcgcggaagccctcaattagggttagaaccacgtccacgggctgcagcaaggtgtagtgggtgtggaagaaccgggcataaaattaacaggtgtccagaaagatagttgaatttagtttaattaatttaatggcgttatggttgagataaatgtatttaaaataggtagaagaagattatgagagagatgactaagtagaaaaatccaacctccatcattgtcgtcaatcaacacttttccagaaattgaagtctaaaactttgtgcctactcctacatcttataattctcgagaatatatatttgaaaactactctctatattaattgtatatcgagggcagagtacaatattatttcaacggtcgacgactaccacttctttaatatcagtctgtagtccaggtctctcgatttggcccttagccttgcagtaagatcttggagatgacagaccagccacatctggcatagcttaggcccaggcaccgacaatagacatgcagaaagctcctaagcagaccaaaagaaatgcataaactcgtcttctcccacgaaggatgcgccagctctcgtcactaagaaagtcttccgacatcagctctacgagagaggcgaagatcaaaagtccagcggaaatggcattcataatgccaacaacgagcaagccgacttccgagtccgggctatagagtgtgtgggttgcaagcccgatcgcttgtccaataggcgttctatatatccgtcagttcttcaatttttgaatgaccatatgtgaattaaagaaacatacgtgcagccataggcaagtgacataaaccagggctgtaattgcttttcagaccaggaaagcgaagcaattcgggatcccaatgcgagaccttcgaaggtttctattgactattacttatttcattcacaaagaggtagaaagatcaaataactcacgatggaatacaattgcgatcaatagaatcacaaattcactcccaattgacacactgagcgacatgccaataaagatactatgaaagagaatacccatttcaagaaggtaaacctgcatggtctctttcctttggttctgctccggtgtaagaatatgatgatcattatctcgctctatatccgaccggaatactccattttctttctcgtgatgagtttgagtctcaggagtagataagactctaacaactgtttcactttcatcgctcatgtggtgaataactcggcttatacttgaggatcttccgaccagaggacccatatcacgtacatggggttgataatctagtgtaacggaatgtgagctttgcgctcgaggttcagccgaggtataatcatcaagttgtgctagcgtatctctctcgggaccggaagaggatcgcttctgtgataagtcataatttcctccacggcaaatactctgagctggactaaataccatctcaatgaccgtgataaagaaaacacctgctagtgcaatagcacctggcatggctgggtagtcatttgtccagaagctggaaagacatgggtcacctaacgattgaaacgcagttggaagcagatgtacgaatgcagtggcgatcaaaacgccagttccaaaatgactgacgaaaaatagaaatgaaggcggaatgtgcagtcgagggaaccgagttgcgagaattgggaatgcacatgcaatagtcgatgttccgaggataatgaacagcgctgcgacatgtagtggaagatcgtatgcagcttcgcggacaccacctacggcacaacttgatcgtttggctggctgtgagtcttgctgttcaacaaggaaagttgtttcgagagctagaggtgcctttgggataaaacaattgcctaagctgttgtgggaaatcaaggcagaaataaaaaggaccgagagcagccaaagcgcccagtctttgactttttgatacgacaagggggtcttgttgagatctagttctccgtgacgaatgctaagatttttttggggagcgaggggtcctatttatttgatcagcgatacaagcatcaggggctgagtatgacatccataccaatggacgcctcgcctaccccatggagacgtttccccagatctgatattctgggccagtgagcatgagcccagtttgaatggttctgcagtaacgctagtccatttttatcgcccttgttctcacgggtgttggaaatgccaagaagatcttgacgggtcgtcaaatcaggagcgaaacgcggcgggttctgattccactcatcatggaggagagtatcatcggtccgggaggggcaattcatgatgcaaaggtgctcagtgtatcagcttatctagaggttcagagaaaaggaacaggggagcatctatgcgcttaaataagaaaataatccattaggcaccatcgattcgaatgcttggcattcggtggactccggcccgatttcttggcagcgaggaccttttcgccgagaaactgcgcgatcatgaacaccgcttaggcggcgagagttgaacacggcacatcaaaagtgcgagtagcaagagcagtagggctctttgttgtctcttaaaagcctagcttgctaataattcataccctgttgctctgctgaatctagaggatcgggggcgaattagtgattagtgacataactagtgttgttaaattaattaagtgctaatttatggacggatggggtcacttcaacataagtgacttttgccaagccactccatttattaactcatttactaattccagcccagcagaatccgcttagaagttgacttcctttttttcaacctaacccgtaaatgctgtttcccgctcatcccaactaataatttgagtgtatcatcgttttagatgaggttcaaaagcagactttgctaattagttacaagttgtatcagctatgtattagctatgcctaattggggttaatacagaagggcttacaatcataagataataccagttagtaagtggccagtaccttgctccaaatagtggagccctggaatgttcccgcctgcctaaatcggcggttaatatatgcgttaaataaattgacgcaagatgctagatcaaccctattataccctaatacctccgtaactactccgtagacctcggcatttccctatggattctcaaaattatcctcccagttccgatagagcaatttccataggagtaggcggtttctcctagctcgtccgtatgttgtgggattcccatagaatctcataggaatgccacccactttctacctaaatctacataattctgatttcggatgcataggtagaatggtttgatatttaagccacgggcttaatgatatttgcattatttacagtccttttggacttccatgggaatttggtgtgtgccgtccacctacagctatgggaatattccatggatggataccatggaaaatgccgtctatccacaatcgaaggaggccctgcagatcaagttcgctaattccgatcaccgggtgtttcacacgcattccatattccggaaaagtcttgacagtcctgatatgtcggtatttgagtataatctctgcctcatttcagtcttgaacgattttcctaggaagatccgtctcgccttgtattttctgaagtccattcaatactgaatatcctcgacacatatttggtttcactcacgcctccttctttacacgagagctcgtcacccagcaggccaacgacgttcgacctcgtgggatccttatggaacatcggttcaccgcgacgggctcaagtcattggagttccgtgggaaacacagatcggatcattccccacagttcatttcgtcggccaggaaaccgagtgcaacacagatcttgtccactgataattgccctgatacttacattaatcgcaaccgcatttttcctgcccagacttttctggaatggcttgccttcgaatctgtttcttccagcggacactccgcccactataaagtaaggtcaacgttcaaagtcatgcgcagccaattaacccaaataacttcaatatagaattatcagtgataagcacgacaaggtgttcgctacgggctgcctatccgttacttatgagattcagagatctgctcgtatgaacgctgctttcgttgtcctcgtgagaaaccaggaattagatggaatattacaatctatcaggtctattgagagacatttcaaccagtggtttcactacccatatgtctttctgaacgacgccgacttcgacgaggaattcaaagcaaagatcaagagacatgtcagcgctcctgtggagtttggtaaagtcgaaagcactctctgggactttccagattgggtcgatcccgagattgccagggagggcattcaaaaacaaggtgatgctgacataatgtatggtggaatggaaagctaccatcatatgtgtagattttactccgggtttgtcttctcgaagtgcacattaataaaatgctgaactttcaacaggcaattttacaaacatccgctgctgttgaaatatgaatggtactggcgcttggagcccgagattaagtacttttgtgacatcacatagtgcggtttgatcttccttttctttttctgaatttaattaacaagcgcaaatagtgacccctttgtcaaaatggccgaggcaaataagacctacgggttcactatcgccatcaaagagctccaagagacagttccgaacctcttccgatatgcatcggcatacaaacgcacgaaaggtatcaagtccaagggtctctgggagatgtttttaaatcgaccgtcaggagtaaaattgccttcctcggaggacgagaaatggaataatcttcctgaggatatcactatgttggattccgatcatgttcattcggatgaaatctgcccggatgccatggagggagagtcctacaacttgtgtcacttttggagcaactttgaaatcgcacgcctggattggtatcagagcaaggaatatcaagaatttttcgaaatgatggagagaagcggtggattttggatggagcgagtcagtaaaacatccccccttccaaatggacgcatgcttatcattaaccgagtttgtagtggggtgacgcgcccattcactcactcgccgccggtattcttctttcacccgatgatgttcactacttccgtgatattgggtaccgtcacaccactattcaacactgccctgctaatgcgccagctcgacaattgcctcgcgctccttttcttgaccaaaccatagaagatgaaaaggagcgtttggaggaagacgaatactgggctaattttgactcggtccgggagaacggcgttggctgtcgctgcaggtgtgacactgatgtcgtcgatgccgaagataaagagggttcctgttttgccgaatgggtggatgttgcggggggatggacctctccatgaaacatgaaatacatagttattcacatgcatgctctcgcatacgatcttgacccttgcgtgtgcctaggaatagaatcaatcacagcaaattcaattagtcttcgaggtttcgatatcgaagacgtgctactccactacataagaatttggtttacgagtttcttcgacaacttccaagggatctattggttcgaccttctcgagtcaatcattcaagacgtccccgtccatatctacaacttccatgaaactggtctataaatcgaccaaggaaaacctccgaaaggtgttagtgacggccatagccgctcagcatatcttccatgcgagggtacacgcgaattaatcaccaaaatcgagcgtatcaccgcggacgggttcgttcttccgaaggacaaatctctctatcgcgacagtttcgagccttcggccacatcttcgggatccaaattcgaaaacaagctttcaaaccctcttttcgaggcgatggtatttatcctttcaattcttcaattgttcaaagaacaagctagaaaacccagagttacgagttttcggaaacgatacttcatacttctcggatgctacacatccacaactccaccaaacgggtcgtattcaaataaaatcgagaattcgatagagctatggggcggcggaaatgtatcccattggttccctacggtaatagtatggacgcgacacatgctgacgcggcctcgtatgccacgcattacgaagacccatagcgcgcagggtccaaaaaccccctttagggcctgactgcctgaattagcaccgcgctatacaatgtattgtaaattttaattacaagtccaaaaagataaagcctttgggcccgcacaaatgtcggcatcttcatatttctggagggtttacaagttcaaaatatgaagcttttcatcccagaaggcttcaatgctgagaaataagggaatcctaggatttgtgtcacatttcatgcccattttctaaggcattcctgttgtcgacctcgaagagctctgttatggtaattcaggttttcaatgtttctgccgttctaaaataaggcattcaaacatcaaaaccccttttagggattttgaaccctgagtgctatgggtcttcgcatgctatttccgaaatccggagcaatcaagggcgaaacgatcagtttctcgttcgtcttcggtcaaacccggcactaaatttgctggtacaacaacaagctagtttttctggtgatacttccctgtttgctataatctgtgacattacaaaggaaaccaagcatttctctcctctagcaattgattatcatggcatactttccagcaatcttcttgctgactctcttatctgccattatgcctgttttatgcagcgcgacatcgaatgtacccagagactgtcacccattgccaaaacatttcggctttcttccccatccggtcaggttcgaagtcttgcgcaaagaaaaacatgacgaaaaaatatgcttccagggatcgatcgaaaccaggaaaagccaatccatggagatgaatcaacctagcaggcctcaggagccgttttcatcaacgcgagccgaaaatgacgatacagagacagctgttactacttcacaggtaggagaacctctgtgggttctgaaagtggctgcaggagaccttgctaatcaatcggtagggttctaatggcaaactggcggagggtacggaactcaaattcccaacattcgcgaagaagagccttcccgctactgagcatggactcaatgatatgagctcgccatttccctctaaagaagatacatccgttccttccgttgacagttcactccactcaatcatttattcattcgccatgatcattgtctctgagattggtgacaagactttcattattgctgcactaatggcgatgagatgctcacctttgtttgtatacagtgctgctctctctgccttggttgcaatgactctgctttcggcccttctcggccgcagtgttccgacattgcttcccgatacatacacaaaaatgttggcggccgtactattcttcgctttcggcttgaagatgcttaaagagggctatgaaatggctccaaatgaaggcctcagcagtgagatttcggaagttgaaacggaattgaaggaaaaggaccatgagcgagtacgtgacggcgaccaagatacatatggtgaaattttcgatgtggaagctggtcatgatagacaagattgcccagcggatcagtcacctgcttcgctaggtagaaatttgtctgcaagccaccagtttcctggttctgttcggtgccattggcaatctctcatggcaggaatgagcaacctattctccctttttctcagccctctatttgtgcaaatattcgctatgacctttttcgcggagtggggtgaccgcagtcaactttccaccgtggtaatggcaactggtccagattattggctagtgattcttggagctgtttctgggcatgcgctctgtaccgggatcgctgtaattggtggtcgagccattgctggtcgagttagcatgcgagttggtaagtggctgccatgttgcgaaatcctggatcgaaactaacgtttacagtgacgttgggcggcgcggccctttttctgctatttggactcatatacctgtttgatatcatccgataaagcaaaatgctccacctggttgagcgtatatatgtccgtgtcgaccactgtttgaatatgtttcggacaagttacaagcatatggttgatgtaaacaggcttatcaagacctgaaagaggtgtgcttcctattgtaagattaggtcatgtggcctcctttttgctcctagctttacggagtagtcctagaacaactcagatcgagtattccgagatttacatatccctctattacttatttccatatacctacagttccaccgtaaagtttttcatactacccccatcaaacatatatctcatacttgcaatttcgaggcccaatatacactatagcggggcatggtggttccaaagcagtggtgggttttgtgggagctgagaaaaacaagctatggtaatatcaaatggtaaagtcaaatcagaatcgaatgatatcgccccgtctaccccataggtttcagctccatcttgcacggttagtttgaccaaattcatcagcatcgccaataaatccgcaaccaaaaaagaccctagaagtttattattagagttatttttcacgccatacttattatgttgtgattctctctccaacaaaacattgctttgcagagcctgagcgcatcgcagatcttcggacccatttagctgctgttactgccccaatcgcagtgtgtagtcgatgagacgatttttcgattttcaccatcttgtcgaatatcgtcggagaacctttcattctcgatatggataatagcacatagtcaagccgagagccgctcatatctgatttcaaagaagcttgcatcacggctgctgtatgatgcatcaatgccagcttgaaacacattgtagtaatttgtggcgatctttatcaggtacatacgtatctggtttggagaattccgttccgctctaagtctaccgagctcttcgtttttctctcagaaaagacgccggatatcatcacgaactttgggtagctcgcgctggatatgagtgtctaggatttcttccagaaaacatcgcagcttgtcgaccccaacgcgtgaaggatccagccctgcttcttccaaacctcggttgaaaaatacgctagtcatatcttgcgtcgctgttctgtggttattcctgtcttcagcttcgtcgggctggtttttttcaggatgaaaaatccaaaggtgagtttgatgaggtcacagttctaggcaaggcgagcgatacgtgcctccgtaccggcattgatgagatatgacttgggaataataccgaaagtgcagagaacatcctaaacgaaccgtctcgcacgctagatgatgccctgggtgtcaacatcattggtggccggtggctttagacatcatcctacgaactatgcaaatcccaatgcgctcgcttagctctttcacataacaagaaggaatattttctcctcggccaggaaggaaccaatgatccttcagatcgtaacactcgtggtccattccccggcatcttgctttaacctcctgacacatcgagtattcaatccattacctcgattaggccgtttcacacatccggccttagctgctgtattatacttatcatggtacttatcatggtaacttccaattgcgtccgtatcggtgaactcatctgcccagtaacacaaaagaactgctccaactctgcggacatagacagcaccgacagcagagaagagcctcaaggcagacgagcgtagtctttccatctctccgataaacattggatgggaacaagatggccgttcctaacatcagctcttcacagtaaatggccatattcgtcatagttcgcatgcaccgaactttacagggaaagaactacgtcgtcagacttcatcaatcaaagctttacttcgtacaagatctcgaagcccgcctagcccatcagatcgtgcattaaaccagcttgtaaaaggcttccgtcttacaatgcaaggtgctatcttactcgctaaagaaaataaggatttacgcgccgccaacgagaagtagaagcaaaagcgcactagatcccggaggcagatacctgccgaagaaggcctctcggttcaagaagcatctgcattaattactgagacggtggaagcaattgaagcacctatccccccccccccccgccaccggacagccccgcccannnnnnnnnnnnnnnnnnnnnnnnnnnnnnnnnnnnnnnnnnnnnnnnnnnnnnnnnnnnnnnnnnnnnnnnnnnnnnnnnnnnnnnnnnnnnnnnnnggaacaattggaaccccctcccccccccccccccggcgaagaaggccttcaccacctttacagccccgaacgagagcattaccaacatgcgggttatgcaaaaaccaagggtcataaaaaaattgcatgtccagagaatagatcattttagtatatttaatttaatggagttttggttgatttgtatgcatttgaaattagtaggtttggttggggtggccactcgcttacaatggccactcgcttgccgaatacgttcacgtatttcacaagcgagtgacgcagtcagaaacacgtagtaaatagcataaactacaaccttatatatcaacaacaacgtccttgtttgatttcatatctattcgatagctgttgataagaatttaaaatgatatataacgtaattcacaagcgagtggccaccacaagcgagtggccaccccacctaaaaacgcgtccatgaattaggacttagttagttcaaccacccaccatgccaccaatacgctctcaatcctctacaaagtcagtagagcaagagggtaggatcttattagctatccaggctttaaagaatcaagaatttaccagtatttctctcgccgctcgtactttcaatgtaccgcgttcaacacttcggcaccgcctcaatggtatacaataccgcgcgacttctcgcgtcaactctactaaattgaccgcaattgaagaggaatctcttcgaaaatggatagtctctatggattctcgtggatcagccccccggccctctatggtacgagaaatggcagatcttcttctcaaataacgggaactaccccgattattttagttggcgaaaattgggttacaaattttgtcaaccggtaccctaccctctcatcccgattctcgagacgttacaattacgagcgtgcgaaatgtgaagacccaaaaatcattggagaatggtttaatcttgttcaaaaaactatcatttaatttggaattgacccggacgatatctataacttcgatgagaccggatttgcaatgggattaaccgcaacggcaagggttattactagatgtgaatactacggtcggagatcacttttacaacccggaaatcgcgagtaggtgactgcaattgaatgtataaatgcggtagggtgggccctccctctgtgtattatttttaaaggcaaggtctttattgaatcttggttcaatagccttcctaatgattggcggtttgaagttagcctaaatggttggacgtctgatgaaattaaacttcgctggctttagaaactctttattccttccactttatcgcgtatgaagggaaggtatcgacttttggtacttgacagctatggaagccatttaatcccttaattcgaccaaatttgtgaggaaaacgatattataccaatttgtatgctaccgcattcctctcaccttttacaaccacttgatatcggctgttttgcggtcctaaaacgatcgtgcagtcggttggttgaaacgaaaatgcggcaaaggattaaccacattgataaacttgactttctcgaagcatacccttccgcacgaattgaagcttttaaattacagacaattaaaaatagcttctcggcagctggtttagtacccttgttacccgatcgggtactttcaaagctgaatatttatcttcgaacgccaaccccccccccctccccctagccggggtagcgatttaagccggaattttaccccaaaaaccctattcaatggcaaagatctacgtcgacaggcttcttcaatcaaaggtttacttcgtacccaatctcgaagcccaacaagcccttctaaacgtgcattaaaccaacttatcaagggctgccagcttgcaatgcaatctgccgtacttcttgagaaagaagtaagcgatttacgcgctgaaaatgagaagaagaagcaaaagcggacccgatctaaacggcagatacccgccgcagagggtctttcggtccaagaagcttctgaaatgattgctgggttggtggaagcatcagaaatacccctagaccccccgagcggaagcactcaatcaaggttagaaccacgtccacgggctgcaccaaggtgtagtgggtgtggaaagacagggcataagatcaataggtgtccagataaatgattctttttagtttaatgaatttaatggcgttatggttgaaataaatgcatttaaaaactagattgttgattggggtggccactcgcttgtggtggccactcgcttgtgaattacgttatcaattcttaggcattcaatgggctgtaatatcatagtatcgaaaagtacatcgctctaagctagaaatatgtatatccttatcactgattagtaaaaaattctctaaactttatagtgagactagatgctacctaaaaaccattagcctgtatggaaacaccccaatagaccaccgttgttggggtatcaagttgtaatttatcccatttactatgtgtttctgactgcgtcactcgcttgtgaagtagttagttaggcctcctgtctttcctgcctgaaggataaagccacaaatgtaggggttccgagttttccccactgcgatatgtagtcgtccaatcggttgtgattgttccgatgctcatgcatctcgactcgaaaatcttcttcacttggaagtttcctttatctctttagcatcaatctcttcgccattataccactttttatgcctcagtactgttatcttttttatattcgtggtaccatcgtagccgacaatgaattcgagagaataggggctgatgtctataactcgactagcaaataggtccgagaaccctaataactgcttctttggctatgtactcttcagttgtctatggccatgcatttaaaggactactggcccattgcggagccaagatgacgcggtctgggtaaggtgatttccgcttttcgctagcgtcgaagaacatcgtcggagcagtgaagatcaatattagtatcatgcctattgagtgatatactattgtgcttatagaagctataatgagtctattgtcttaggaaaggcggtctaacccgtaaggtctcatccatcgtacaaatataccagtttattaatcaaggggtgatcggccatatacctttcaagggttgtttttgaaaacatctttgctgttctaactcctaggaaaggcctcctaagattcggtcccccctcgggtcttttgtcttgaatgttaaatagaatcataaccctcaaggtgaagtaatagcgggaagctaccaattctgctgtgcttcatggtcggcccggcgtgtatctcgctactcttgatctcggtatcacagctgactcaaagtgaggaaattgtccgcgatgaggaaactgcccgagatcactggtaaaggcccgatggagacaatgaagactttaaagagaaatattccactggagattcactgtggattcaatgggtgggctgggattcttactacacgaatgtttatatgcttaacgagacgaaagccaacctgtacgtgaatatatggcacctagactacgacgcgttttataagattcttacatgtacgtgatctccagccatagacttttgaacaataagctaaaaatcttgtaaatagcttcgattgatatctcgacttatggatcttatgattggaaggttgacattgatgacaaatacttgatgcagactaacgagtacgcttttagttttgtgcctgacggaaagcgctttaccacctatggcgctaaaatatctttaccgggaatccgtatccagtctaagtcgattacgtccttatccacgttgctagctattctaacaatgccctcgaaagcggtatcctctggtatgtatagacttttaactggcgcgaaagtagggatcggtattggtgtgggcatagggggcttggcgttattatttataataggatttctcctattgtggtagcgacgaccatcctcacaagaggtgaccagggtgatagaggcttctaagccaggctcggtctaaatactggatgacggcttctgctagaagactagactgctgccataagagctacctataggatctgtgttgccggctgagttagtatcgacgtataggggatgacatgagggcatgctcctaggctttggaaataccttttacttattcagccagcttattgaaaattttgagatattcgaggtaactcgatttgcgaaaatgctatttcttcaccatttctatccccgatttgtctgacatatattgttttatttctctgattactactgtattgattgaagatcatgattgaagatcatgatgaagctggctttcacatttatatttttgcttgtcgagaggactaatattacctataggaaatcgcttaactaatacttgtacctgaaagtcctttatctatggactggtgcatttgaagtttagtaggttcttaaataccggctcttggttgaaaagcagttaatttggtcgtttaattttaaatagtcatgctatcaaaatataattcaaatagtgataagagtaggaagcgtctcagtcatatagccgctcctcttctgtagcagtacacttccggcacttttcttctggctgtgttggtgggaagtcaaaatcggacacagtgtctgtttcaatctcctctttcgcgatgatctcttgatacctgctctgtagcaactgcgtggcgagatgtatagtggcccactcccggggcaaaatggtgtcggagatcaagatgtggtcggatagcgtttgtaggtattgaattgtatcgttgaccatttgcctactaacttttgtaagacttgggagtctttttcggtataccagtcgcgagctatccggtatttgagggggggagtgtgaatgtcggtgtcgcttttgtgggagagatgaggccgcggctgctctcttttttgtgtttaaagggggcagtttgtggatttcagcctttgtagcgcttcgaggtaatatatagtccctcgggctagtaacagaagtagctacctctgtagctacagacctagtggactggttaatacatggttgtaaaacctggcttgtatggccgcgattttcgtcgatgaactggctaaaaacctggtagaagcctgtatccgatttattgcctttataaatagatttgttagccgatggatttctctagaaggggatctagaataacgttactagcttgctgtgtacgtctattgtgatcttctgtgtctggtgaaccggacctcgctgatacttgtgaccgcttgtggtctatgattggttggctttgatagtgatagtgttgcactggcaaattattggttggagaaaagggagggcacgagagcatctatggtgaggataaccatggccttttaaatgtttggagctcaagcagttaccatcaaggatatatccacagtcaagatttcgcggcttaccgttattaggccagctcctaggactcctagagggactatggacgtcagtatgtggtcctaatagctacgtatgctaacagtcaaatcaagcatgatttaatctagttgccgtatctacatggtgctcggcccacctactgatttaaagcatattcctaggagcaacctggcttacaacttatagatgcttataagtgggaacttgtgaatgggagggcacttctgacaggcccttgactcagctacgccgtgtagccacgataacgatcccactagctgaatctgtttgatgcttctaggagctctgaactctttaggttctttaatcataattcgttcgttaactttatagtattggtgtttggtggtactggcgatatacgtggtgaatggtgttagaaggttgaattaacgttgatatctatattaaatataaaattccaccgaacaccagctgtatatgagttttccacctatagaagatacctatcggagccatgttagttcccttctaatagcggacttggttaaattcccacttaaagctcgtttctttatcagccccgctataaactgaatagtgacggttatcccgtggcctagagacgcattgtaaactggttggtaaagataaagttaaaaaaagagatagaaaatatgtgattttatctcgtgggaaccgttggctaattttcaattagcggcaaaatgcggtcccttcgagtacagcaaaacgggtatcgcgaacagagtatatataacgtttatgggccccggagatattgaccggcttcatctttttgcctcccactctttactaactgcctgatttaaattaaatcatgcttatcgcttggtctgactagccagcctaccgtggccgatattggagtaatatgtctgttaaccttagtcttcgtaatcggctacagctaggtttggaattggcttctacattttatacagaacctctgctaaaccctaacgctaagccgatggtaaaactacctagtcttaatctggctagtctgcagatcatttatatgcgtcacaatggaaatgtaacttatctgataagactaattaatataccgaagcgttgaattatacgttattcgagactgtcctaacttactaccttggtccccttctccactaccaagagacgaatatgcacgacaaaaagtagctcgaaaactgccctcctctatccgagaatctattcgcgatacgatcttgagcaaatcactgattatggcctagatagctagtggtgtagaatgcagcttgagcgtgacgtacggtggatctgagaagcttacttcgtgggactggaaatagtaaaatttgttgagagaaccttgatctactcttcgctaaaactctataccctatgggtttgttagggacataccttatctatcgcgataagagatttatattaaatataaagtgctctaaaaaatcgcgcgttgatttatttctagaggtggagtaatgttatagatatcagttgaattctccgtttggtattaccatcatatgtgttgaacaacccttgtaagctgtgataggaaattaacgcactgagcaatcgtgtatactccgtgttatctttgcctatagcttgcttttcttatgacttggaaaaagacagtagtcttcctttatatgctggtttaaaagtgtaatcctgcaaccgtgtttgatgtccctacccttacaggtgggaccattccacctaccaagcatatctgtccacgattttttgtagttaggatcctatttcacgatatcggaagaccgaagttcttttatcgccggattattgtagtaacagtattccgagtagactccttgctttgtgttcgtaaaaactttttctaaaggtagctctaccgtttcatgacattgaataatatcataaatattcagcgttatgctagacgggaagtgtaccttatatcgagtttgattatatttccagccatgctgaagagcggtaaagaacctttcatttttgtatctgagatcgcctgaataatcacctgtgataagagtaaagtagagacggtttgacgatttcctagggcgataggcgctcaagttatggccaatgagaactggagaatatctgttaaatgtcaaggcaaattccagctaactagtgtctttgaatatctgtttctagaggatagaaccggtatttatgatattttttatatctgctggtgttaaaaagtccttgatacttaactaaatattaagtggggtttcaaagagctttattgtaaatgactgacactggtgccggtgttgacctagcttataccagggaaagtatttatacttcactgggctatttctgaaattagttaaccttacaaaatattaagtaagagtcccgcattcttgtcactccctccggaatgcacctatgcctgtgattatagagctggttaagaatagaatctatgctctatatttctctgaaagttgtggcctaatgccctgcctatctgacccttgcttatttttaccctagcttaagtagataatttctatgggcaaaaaaacatgctgttggtgtttagtggctttcatgtttaacgttgatgtgaacgttgatattaactttctgacactgttcactacccgtatattgccaaaggtggttataggaaatagtagtaggtatcatttccactagccctttgccgaagcgatatgcagtatacaataactatatatctgagtatagtcgttctcgaaattggcttgatagatataatcttcgtcactctgttctgcccctactgtaaggccttagtgtatattaataatttaggggggggggggggggggtttaatttttggagtggnnnnnnnnnnnnnnnnnnnnnnnnnnnnnnnnnnnnnnnnnnnnnnnnnnnnnnnnnnnnnnnnnnnnnnnnnnnnnnnnnnnnnnnnnnnnnnnnnnnnnnnnnnnnnnnnnnnnnnnnnnnnnnnnnnnnnnnnnnnnnnnnnnnnnnnnnnnnnnnnnnnnnnnnnnnnnnnnnnnnnnnnnnnnnnnnnnnnnnnnnnnnnnnnnnnnnnnnnnnnnnnnnnnntgtggtgtgttggggtggggggggggggggggggggggcattaaattgatagatgtcgaaaaaggcgccgagtatgaaactgtattatagtatgtagattaggtatatttgttcagtcgctgtagttaggtgtaatactactcgcaattttatctgccggcacccagttttgagctaagaatgaagcgagactgccaatacctttgggggatacctatacaaagatgaaacggtctgatggtacactttaaagatcaaaatttcatttgcttagctgctaagcttgctccagaactctaagccacggcgtctctgttgctgatatagatcttatactgaaagcttggagtttagatctgatctaacttgtatcttacttgagagtaatcaaaaaaaatgactatctgcgtttggctttattggtttctaattaacttggcttattgttgtatatatagccttatatttccctcttggcgtccagaaaagaatttgtctataaattccctcggctagttatgatgagtaaaatcgagttggcaattgattgaagcgttctaatttgggaagctcggggacttgaaggccatataagccacgcttgttcgataggtgtatcacaggaagggtgtccaaaatccttatttatgctttctttgataatctaagattctatccttgggtatttacattaagtaatgtcatagctccctgcttatgatgtattaagctctccatttagtttcccagttgtgtccaaaattgctcgaccacagaacctgtatcttatcgcggatgtcctcggtgatatcctcccattctccgttcatattttctagtatgtcagcatctataatgtcgaacttatggctagcccagtctcccttggctagatatcctccccccgtaatgccggttgaactgtcagacgaccaatatatacgcatcagagctatgtggctagcggtaattccacagggcaatctggcctctaagatatattgattagtagttaagttccttaggattcgatctttgggatcgacagattcttctatggccgggagagtcgctccttcctctgtgtaagaccaaaatttaaaattctcctcagcaatattgtagcggagaggcttgggtgttactttactctcggcggaaatcaggtggaggctgtcttgctgaatcgtgatagggagattgtctggttttaagtaatccccgatatagatgagccgcgtgctagcctactcgtattcaatcaagtcacatagaatgttggcctacgaggaaaaaagcaactctgataactttctaccaaaaagccgtgttgtgtactcgcgtttggacggataaaccactagctagtattgacctattgtttgtttgtttgaaagaaaggataggaagattgtgggagtgggggccgtagggcaaagttgaatgcttgagagatgctaatactggatgtaacgggaagacggtacagttgtgaattggatgagcttctaatatggcctgtctggcaagatgcttgactcttatatactggtcttgtgggagaatatatgggggaagattaaggatagaaacgtctgtaagggtaggacgggaagtatggtggatgtagcgaccaatctaatcccggaatacctgatgcaagttttgaaaaggtagttgaccctgggagctgatagggtgaatttagtagctggtttacttaagacatcagacatatttggcggggccgtcgactaactatcagctctgcgtagatatctattaaacttggtatttgtaaagagtttacaacggtgactgtagaaatatcatagtcccagtaaatcatacgtagcttgtaaaactggccataatcactatcaaggattgatcatgttcctgcctgtggttctatctgtgctaggaatacacatcttggtcctgggcgttctctcgctcccggaggcattgaaaagggttctgggagcacagttatagatttcgaggggctagataagctcgagggaacctgaagtagcttgggggtcttatatatccacttaaggaactaaggtcatgttttatcaagtgctagaattataattgcagctcctggcgttacggctaagccctgggagtgattaaataacgcagatttgtgcgtagatctggtgaggatgtcttgtgagggctttctacgaccttagaaggtaagatattgattctaggaccctatcttaagctcctaggctctaattagctgatatcgatatttccatttcttcggtcgccgccgctaggtatgatactactagtacttttatctaccgatacttggtttcgtgctaagatatatgtggaattaaagcgaacctgcttacaccgtttgtgggtacattgacatctagtatatataaaggtgaaattatcgcgtgctgtcggtactccggagtttaataatcaaatttttaaaccagcctggtaaatcacgtgacctatatgtattaaggatgacggtattcatcctagattctgatagttgcaaaggctgcgctaaacccctaaatcacggctatgctctctgttgctggccctaatgccgagcgcttggttaaatggaatcaagtgattgatagtcgcttcgctaatttttcattttcgttacacctccgctgcaaaatataaatcatgtatgctgagtggaagctagtcgagccgaccggcgaagcggtgtagaggtagaaaggttgggcggtagatgagcgcctgctagtccggctgagcgacgggctgtttacctcactccgctcgactgatctcccttagggccccactgaccgctgacgcggctgactctgatgagggtcattgggtgatgaattcctgataacggtaagttctctgttgggagataattgacgggtgcactgacggctcttgtctgtgttcgtgaggtgactggtcagtgctgtctgatgtagggcgtcccctagaggctgacgatgtctgacgctggctagggtcactgtgaggaatcacgcagatagtaaataggttccgaggtagtatagaagatattgagctgatagtaaaggtagaaaatgattcgaatgggtattgatgtcgcgcgatctctgtaaagttccctcgctagctttatatagcattattatgggatctatactaatatcacgcatcgctagtaacgtggaaattctcccttgaaacagttgatacgtcgaagaatgtactttgatatgactagagctcctagggaataatcaccactttctaggaataagatgagtcgggaaactagctaagttaaacctcttctacgcggcatgtactggcgaaagagcaagatgaaaagtccactgggtactttctgaagattatatatatggtgtcttccctctatggtaatatgcaccagctcacaatctgtatcttctccggtagattatatctaaacctcgcgattgacccgagacgcttttaacttcactttttcatcatgtctaggaatcctgctcatctacaatgggtattgggctaagtcttaggcgatcccttgcaccgtgagcggtgtatatgggtaggagatgataggaatcactgttgaaataccgtgccgcttgactcctggattaatggagtactgtgctttcagctgctctagagctctctgtccgcgtatccactagcgcacgagtttgccttggctgcaaagcagttactttgctttgagtgcagacgctatcgctgtcggctaaaagggtgggccagccaaatattggatatgttggatatgcgccgagactaagccgaagatgctatgatttactcggaatcttataattcggctagagtggtatatcaatggctaactagcattccctataatattgtcacagccgtgccccctaatgaggctttctcgaaaaccgaaagggaccttgtaaagaaataaaactagcgataaactcctccttggaatatttgggttggcctagggccgtgaaaatcgaggatccggaccttctccagaccacaagcggctttagttgtgttttgtgctatatgtcttcagtacaaaccgtggaatttatgaataacgaaagtcggttactcgtctacgcagtatgatcccttaagttcccttatgcacgagtttcgcacttaagtgccatctgaaagccctgtgttcttacacaaccgacccccaggctgttgctccccttctaggttgtggaactgaaaaagagtatggttccaggctgctttgtggatgttcgcggtagtggatctaaaccgatcaaggtctttttgtctcgtttttatgatctgttatctttattgggggcacctctggggatggggcggcggaccgtcgtgtatgttccaatttagaagcggcggtaggtgtatgtatctttgggagagattttgatcgtctgatactgagaagaaaagtatctttgaatttatggagctttcgcttaagcctctgaaatctcgaagagaaaattttccctatattactgtcaacgtgcttatagtgtaggaaaggaggatggcagttttgaggcggttgttgggatctaggaaataacgataatatccggaggcttatataacacaaaatcatattatagcactcatcaaatgcttttggtgcagtcactaagaaagattggtagcctagaagagctagtgaaatttacttctggtaggtccatatcataatacgagattgggttaccaacgttaattggtatcaatattatgcttaaccacaatatacctacatctctttgttttaaatgtattgcggttaaattaatgggttatggttcagcgagctctacttgatacctagtatgtatatatccaatgtatcagaggtctacttgtaaactgcctttctttaggaaataggtttggcaacgatcttttttaacgcttaagggttttattttcgtatatcggtgaagaatccggtgagcagctggcgagatccagtataaccagttgagctaactatttactggcttttcgaaagtgcggtcgatcctaggtggagaagcgttggtagagataacggtagcctcggcgtgacttgttagctataaagacccctaagtacaattcctgatccaatccatcttgatgaccaaaatggaccatcctacttcgccttccctaattgatcggccagctaaacgatagtgccgagtatcttaagctccagaagatggacccatgttggaaacccatctatagcaagccttaaacggtataaccatcgaacccaatgtctgttatacccctcccggcaggtaatgaaaatacctactaatactaaatagaatctagtgagaacacgtgataccctgacggcagagttcatgaaagtattaaaccttaatgcctcccgcgctataccggtccttaaattgcttgacttgtacttttgcctatgggaatgctatgtcgtcaaatcggcgtagaaaatacgactcgaggaggagcagcgatagctttaagcgttaaatgacttgctagtaagcgatagcgatatccttctatagctctgtaatgaacaggtattagtaatatgggaccgcaaatgagcggtgcaggctctttgtaacggtgttgtttcagccttggaagcgagcgatctttaagcctactctgttggtgagcctgagccttgattaagtccctagatggtagagcgtctatgggtaggaataacgacatttgatcttctaatagctatttgcgctatctccttaggatcaacgctagcgttagctaaggcctatactgctggtgcgcattcgttgggtttggtgacgggtgccaacggtgcacggctgttgatatatctaacgtgttcgataacttcatatatggctatgtactcccttagtttgtcctgatgttatgtaataagaggggaataaaatcactgcttagcctctagcttgcgattcctctaaacccacgtgaaattgctgcttatataccactgtattttttctgacgcattgagacagcgagctttcgacgaatatgaattcttgagcaaaatttgtctgtacccgttgtcttaatggccattttgtgctgatattagtagactacgatttggatcttaacctttacgctatctggtatgaatcctctagtatgccgacgacgcctccctgtcttgcgattaatcctattgatctgccgcaggttcttatagtaataataatgaatgataattttgaaccttgttaccttcggcgcccgtggctaataatatgaatggtcatatgtttaccccgctttggttgtaggtttgcttatttctgtcttcgcttttgggtatgataataagatcagttatttatactgaatgttaaagcctaaattgctttttttatgtgcttggccagtgtaaaccttagaagcttgaattcttcactttgatacccgggtctccttgtaatctcttcgagctctgtatataatgtccacgccttaaaacatcgagggtatagtatgctttttggagtttatctacgatcgttcaccgggccttgaagaatcaatataagagagagaagccagagagatcgataaagagtcacaattatattctaacgaagaggaactcgatagcgtctacggacctataggatactgcttggtgaagaggtagctcagcatgctatgataattgagaaccaaaaaataccttggacgttagattgtttgaaaaaaatcatttctatcatgggcctgttgaagcgacgtgctcaatcctatggcgagtggcctgagtcatcctgtagatcagggctgctaccactagaaagaagcagatgtatgaaccctattctgcctgcgaaggctgcgaagtggagcgctgtctagccgtggtcatgcttaaggtctattctaacgttggatcgttctaggatgccgttgaggaatagaaattatagtgacagtttggagtggtaaccgtttttgttacgctaacttaagtatatacctgagtatagagtagcgagtgattgtttaagatattgcaatggatacagagaaagagtgctcactacttgccgctggactgtatatcttatccctttggtactggtgtcctttctacttggctagcggtaagagtaccctccgatactccgcaaaagttttataggtgtaaacaactctcctggttggaggtcacgtatgttgcaagcggcctagtaggaacttagatattgttgaataacaagttgatctgcactagtgctaattcaaatatataagttaatggctgaagaataataagtgagtttaacgtagatgtagatagttgtggagtcgtcttaccgaccgatagtgaaagtctgttggtcctggtgagtactagggctttatcactgtttcttaggttctgttatgagttgcttgagaaacgaaatgaactctgtactgtatcgcagaagacttatcagtctctggcatattatttaaatatccttcagctacccttgtgcagctagtttagaccctcttcctacgccctataatctaccctgacaagcaatccggctagatggagaaatatggttagaatggttcgtaccacttgatttgatttaccgcctgtgcttatagcagactagattgcgatttcgatctcgaccttcacgcaatctggcacgagtctccctgtatatcgattccagcttaaatccttaccgcatttcatgacattgggctagattttcctaatctagcgaaacctgtggtatatgagccttaagaactgcttttggtcgaatgcttcttcctacctaatcatgagagccagtcgggctttaattggacgggtctggatcctctgtctttctttactctagctgacgatatcttcctttatatattaatgttgcttctctccgatgaggtatactgggtggagttccgacttgcacgattcgattaggtaaccggcgagagagtaggcgagtatatgtttttcctacttagggttgaaacgcttatggggaacttacgccgagtacgtgggcatatattagatattacctcctaagctgctgttggagcgatgatatcttatttccgattgttattgatacctcgttcggaagcactgctatattcgagccactcgatactttctccgttagctatgctacccccgatgctatccctggatccgttattttctgtatataatctctaggaaaattacagtgaatgagcctaggtcgtttaaacatggttgagaagtttgtatgtttgcctaaataacatctccgatgctcaccgccgcctgcagatagttgtaagagattcgcacgattttattgtaaggtatccggttagaaggttgatactacgaatggatagcgctacattgatttttataaatacttgtctcgattcatatagagctgttaggtactgatatgttaggctgttcttctggcaaattctctcttgtgtccttctatatccattaaaacggctagattaccgttcgaacattgattccagtcccagaaaacgcccatcacagacgacgagccgattttaagcacaatttatcttaaactagcgctagtccatcttataggctactcttttatacatatatcaccgcagagccttacagtggtaggacgaatgtttcgacataatcggaaatgtgattggtgttaatggctgtttgggctttacaagctgctggacatccctatctctattttaataataattaccatattagaccaagcttctatatagccagacttggtatacaagagttggaagaagggttattaacggttgtgataccttatttaagactgtgggaggccaaaacgcccatattgaactcaaccttacaagtgtctatttaatcaacaggctttccgtctatcaacgtcttatcattacaaacaaatctatataggcgcagcctaacgtagaaaatagcaatttatattattcaacgctattcataggaaggggaacattaactcagcgactcttttcactccataggatgaaagtgtgacaatgtgggaatccaaggatctcaatctttgctaccactgagccgattctattaactttacctagctagtcaatactccgtggatacctctagccggcatcctatgcttacatcccagagtctacatcccttatattcgaataatatatcgatcgtgctataaagtattataccgtttgctactttcttcttattccacaaccaatatttgcaaacatgctatttacaggtgggggaccacagataaaacgacaaatcacaaaaatatactcgtaaataggggatttagcgtttccaaacgacatacaaattccctgtaataaaattgtaatcgaagcccctggctctgtcgagtggcctggtataggattcgaccaaatgtaacggcctagttatcttttaggcctcggattacccggtgcaaaaacactaaggcggttgtgatggtcacttttaagagtaaacgggtctctcgattgatctagattacagctattgcctatcgcgacctgtgatctattagttcggatatctacctgccccagcgcctcacatcctgctagggtcacctttacctcctggggactttaactaaacacctacagccgcttgaggtaccaaagcacgatacccagaatacaccttatgctagtctaaaatattgcctttactagaatgagtgctacctagcggcatagatactatgaaaatactaccaaatccagaataataactattttttcggcggagaacaaatagaaagtttagacctcgttacaagccaacagtaggaaccgagcccggtttccaggacaaccatatgaactattctagctattaaagcctatagttaggttcctcgtcgatcgccacccaccttacgagattgcaacgctactatcgcactctaataataccttaggcccaacaagcagtcggactaatcaaataacacgcgggaatgtgaatgctagtctaattccgaggtggaaaatcctagcggccacccacggaacagtagattaatgaggtcttatttgtgctctataggaagaattggaaagatttacaaatttccagacgcgatctataagcctagacttgatggcctgcgaataaaatggatcttgatttttttgagaggcgctattgggccagggcaggtatttggaatatggtgcagactttggtgacagaatagaaggctgaatcccgatctgtggtgtcctcctagctcttacgagagtaagttcccctcttaagctgctctgtctatctgctctgtagaacgttctcgaaagtatgtatcttctcctacactaaccttcccctgatgaccaagctatctttgagccgaatacttcctttctatgtgccccaatttgatcgctagtctgataactctagctgacggccggaaaaaatgtacgctaattttggaagactacgtgagcttatgtaatcctattccgccctttgcattaagctaagataccgatcggctccgggatatggcagaagtcggctttgtgggccggcctatttgtggtccactatacagtgatggtcttgtataatatccacaatttaggtagaccgatattgtggtgaacctaccccggtttatgaagtaatctctcttgggacggtaggcacagatttcagtaatgccaaaaagtcagtggagcagaagcctaagctttctatgacgatcatttatgataaccgtattctcgcatggaacgaatttccttggtttatctaaactatgttatcaaaatgatttgcggttctacagttgattaatagtcccgctcgggttccacggcctttgtgacactctattttgttaaactatgagcttggtattccctcgctagtattataattttaagggatggtgattttcatatttcttgatatccgtgaagtgatatatacaacctctcctatacttatattttactgtagcttgtaatcttctgatatgtatcgggcctgtagagaggattcaacttcgccattctgactagacgacttcgctctgtggggatatagcgcttgtattaattagtagtaaaaacagatatttgaagccaattgcataatctgaatcccgtatcgttgggcaaggtgagcctaaagccccgctccctctaggtcccatttaaaagctaagatagtaccgttggttgatcagaagccttctaaagcttaatgatatgacttatggacccccctggtcagtgtatttggtaaatctgacttgtgaaatatcgactctgtattgcagaatccctcagactcccaccaatagaataaattccaaattctaagaacaagcaatttccaatttcatacttttacagaattattcttagatgtaaatactgtacgttaaaataaaaccagcaacaaattctcggaccaagccccaccgggtatcgaataatataacagactttagaggcaaaaactttatctttcggcaagtttccttcccctagaatcgaatacccttcatgactgattggttaaaatcgattccaaattgcgcggctaatcagaagtacggacagaaaacaatagacgttacaaaatccgatcgtaagttttagtttaagaaactaactctctataaagcctatatataaaggcctgtgcgacttctttaacatttgacatttaaccgtaactagggacactcgttttctcgttacaattcaggcgcaaatatagatagaatgagagaactcccaaattttaatcaagaatactttcgaagccaattgcaacgtacactatctatttcaacctccgggtctgagaatacacagagtccgtcaaggtctgcagcaggtgataccacagaggagtcctcttatcacgagaacgactctttaagcgacctacacaataccaactcagaacatcctccgcaaatctacagtataggccccacatctaaaggagagcaggaactactccgagaggctgatctatctagagattacagtatgatcgccttccactatatcgcagagtaagtgctgcgattccccagaaataatattttgtggtatggctacttacgacactcagactagatatccgaacaaagtcagttatacgacctaccagagaaagaacaaagctgatttagtagcaggactatacaaaatctattacatgaccagagcggctggattacaactattcgcagtgatctaaaggatatccgcagtcagttagcaggtattaagatatacaaaatctattacatgaccagagcggctggattacaactattcgcagtgatctaaaggatatccgcagtcagttagcgggtgttgagacagctctagcgataatggctagagggggggacgatactatagagagtgatgcaaataggcgaacgcgtcggccacagcagtaattaggatcaaatatgatgattaattttaactttcagggcctgctattagcccttattggccgagatatcatgattacattatgctttacgaccaaccatatctcactagagcagactcgggctctaaggatatatataactgtatggcggcggaatagtaggcaaattgccttaagatgaattccccctcaccagtggtagtcgtaaacagatacaaaaagatatatcattacagttattagaagttcaaacgcttagggatcattttagccacaatcctctccctagcccactggatcgttacagtccagtagtggatcgatttgagatatatagactcggttttatagccttagtagagtattcccaatcttatgacccaagatagcccacttaattgagtttcgatttataggtgaacgagaaaatactatatttcatactagaatcctagtcggtcgtttgggtttctattatctaccgagtagctataagcttcatataccaagggccgtagcggccagtaaatttcttcataaatagagagtcacatcgcctattaaatgataggtagagcccacagtcacgaggaaacagattcagttgcttccggatcagcgtataatctccccgggatatggaccctaccgctacgcccatagaaccttccctctgcctcccaagctacgctccgcggagcaaaagtctaattatcaaaagatttacatcaatatttcttatatagcagaacagcgatcaacatcaaccttacctctttatttttactggtatcataagatagcagcttattccaagagctatctctataggttaggtatataagactaactaggcggttcctccacaatgaatttagcacattcctaacccctaaatatatggtgtttcacacaagtgattcataatggtttcctagagctacaggctcctaggtcgcaaccggataatcacccaaggcgggaaacccgggtagggtattatgacctagagctccaagcgacccgtgctactcgggccaacttccgtacatcaccgcagagtcaggcaaatagggtactggtccaggattctgaatgttatcaatcgtgctcaagacccgagtagccgccgataccagctcgctatacgtctgatataagaccgcctgaatgtcgtgccataagacctgatcctccatagtagcgttcgccgactcctactgctgctgtatctagaagagctctttttcaaacctctcgttctcagccaaggctttgtctcttaccataatagattgtcatagttccgaagctccctaggccttttcggccagtaggcgctgaatcacctaggagtcataagctctctctttatccatcttcccaagtgctcagtcgaactcttattagacctagtccatcacatccaaacattttcgatagatcgccttataagctttcatctaggcgctttttatcacagaatatccctaaaaacgatcgtcaggtaagaagactttataaatagagagtaacataccagccctttgtatagcttggctaccggcttaagggggtcacagtctaccttagatgtagggaccgtcgaccgatcagaataaggcgaatcggtacacaatctgccagcacgaggctttactttagcagcaccacggcctgcgctattcccagaggacttagagttatgtgccataatggatccgtccgttcgagggataattgctaattcatataatacgccagacaaaccacatttgagtgcggttacctcctagggagcaccgattttaaaggcttaggtggggactaaatcaaaagatctgaaacgaggtgaaataacagttcgcccttaccaaggctttgttactagcatctggatcgtgcctattaggtattagcacgaaatgaaaaagaaaataaaaagaaaatagaagaaaagaaaaaggaaaatatggcgatccattatagggggattaactagggccgacacagaactacattcatctaatcagtggtatctcaatacccgctctatccaaaataatctaagcctcttatagttaacgccctcacattggtctatgaatagagtcgttattgagtaataacagtcatcctcgccctctacgcccttttttgataaacgtttacaaaatttacatttacatctacgtataactctcatattaaacagtaaacttccaaaagcccaggtcatcatctgtttagtatagaagtactttattataacagagttaggatctagattctcggaagctccaccatcgcccaaaccagggcctggtttcccggacaaccatataagccattttagctaccaaggcttatgaaactctaccccacaaaaattacaacgctactatcatactttataaggccctaggccacaagaagtactagtagcacagagaaacaatacccccgtaaatgtggaccaaggatggtacatacagttctacgatgaaaagctcagcgataatccatgggacagtagatcaaggaggttctatttatggcctagagaagaaacagcaaggacttaaaaaggcctagtacagtctacgatccaagacatgacgggctgtttgcatgcggatggaagaggtcctgtgttactttggcttactgaaagggccaccctcataggtacagtgggggcaggtataggatttggaataccatacagatttccgataacaggtcgacgacattatagcgactatactttaacacccctaaaggttgctactataggttagatttaaccacagttaatctagaaggtaagtagggcggaagtctatagaatgctttctgagttgaagcttaaatccaaatgattcatgaataatcacgtttttccccggccgagtatttccgcggttcatcaaaacaattcgtccatttgattttggtatttagctaacagtcaacggtcccgctcttagtttcacccttattataaggttaactttctccgataccttaaatccaagggtccttcttctagctgcactagaacatatcgttgaacatatcgttgaacatactttttattaaacatgaaacggcgtaaatcaatcgtatggctcacagctctagagtttagaccgccctacttccgacccaccgaaccaattcactatgctagaactatagactccaaagcttactccttcaagtcgataaaagtccagacaccatcataggctctcaggtagcctttattagctttcatatcataagctcataaccaggatacatatgtctttgttccatcaggcttaaataaatctagctatagcctccattctcaagttccagcttccttctactcgtggaaatccctaagtgagcatagatacagtcataaccagcttacccccgcaagtgggggctatccttatagagaatatctcaatcgttcagattgtgtccatattctcgatcggcgcgtacaatgtcttggaaatagggattgtcacattcgatacatttaagcgctaccggggcctgtatttctagagtatacaggttgcatcctggggaatccttgtgcatgcgcttcctgccatggcccatttcatttctcaagcatccaacctccccacagcaattcccttcatgatcagatggtacgccatggttaccggccaagccgttgtactctactcgcgtctatacctcgttatctccgacgcgaggaaggtgcggtgggtcctatagatgatcattaccaacgcttacatcctctatattccaatgaccgtcctttttttcggcctcaactacagcgacacacgcttcgcccatcctactgcgatatttgaccgggttcaatcaaccggcttctgcatccaagattttattatcagcggtatctacatatataaagcagcgcgtgctttcaagattatcattacactccgcagtcgcgacggccgcaacgccatcatccatctactttatatcaacattctcgtcgtgatcctgaacgttctactcctcctaacggagtataagctccactacgttcaagtcagtttcaagacggtagtatacagtatcaagttaaaactggagttttccatgctcaaccgccttcggttgctagtacatacgaacccttacatttgtcagcgtggacccgagggctaacgccgaccaagcgataggaatattttcggcaaggtttcttcacgatcacttaccgcaccagacatcagagttcaacctagtattaccgaagaagagctaccacaacattcactgcggccaggtaatatctatggataccataaagagcaagttgaaactagagttttccgtactcaaccgcctacagttgctagtacatacgaacccttacgtttatcagcgtggacccgagggccaacgccgaccaagcgataggaatattttcggcaaggtttcttcacgatcacttgccgcaccagacgtcagagttcaacctagtattaccgaagaagagctaccacgacattcactgcagccaggtaatatccatggataccataaagcactacgccagatatcaagcgatagtataatactccctgaagatgcttcctattcaggaacactatccgagggtcactcaagcaccccttcaagtagctcttcagagaccctacctaggctagaattaactctatcgcaattctcaccaaggcttgacgtctgagcatcccacgaaggaagcttcttactagcatcggacaagctggcggcaccttaatccaagccctccatttgaaaaaattttacacggtataattagtgaatcatacttcagatgatacggttctatgattgctcagtagatatcgtcgacatcgatatatcagtacgatagctaccaagagactcgcagattaagatagaatggttatcacgtttacagtccaataaagagcaaagcaatatataacgaattaagcctcgtatcatttacatcgaagcacatcgttccaaattattcgccataaccccatttattttcagcctacgcagcctagcaatagaatcgttattctgcctacaaaggactatcctagaagacaaaggtagctaccagggaaggttcagattgaaggaaacaattcttatatagctaaataagcacgaataactactaaggagttcgatttccttccaattcctactatacctttcgtttgagatacctaatcctagattttgctttagtcaatataatcagctgtgtcttacaataagataggttaatattttcatataggtctacaacacttatacgtgaagcatcaacactcggtcgacagagcaattataagggggctgttcagcaaagttcaaagaattatgatttacctcacttccaaacgaggagaaagtatagtagaagtctatagaaggtcaagttttcatatagagtgataaagggtaagtaatattagggccaatttaggttataaggtgcatcataagtttaaacgtccttcgatttatatacatttcggagatatatcaagctctagccaatcctggtataaccttttatcacatggaatttagtcggatttaacagaagaaggccatcatccctcctactatgatactcatgaagtaatcttttctttcgcaggcagttacattttcggcaaataaacgttggcctagacgtggttcaatagtatcggcaatcctaagaggtacataaactgcatacccatcactatggctaataactcaccgggaaaatcgaccgacgacacgcccaaacaatcgcttactttttctcctatgtttatcgccaacatggatggctgttttactagacagaatgtagacattcgtcttccttagcctagaagtattgttatacataatagcaacagcaaatatcgtccgtataagggcgaacctaaatttagtcccgttcccatcaccgatacagtcgacctcagggatactgactctatcacaggaaattccaacgatagcttatctgtatggctaccagggtgattaagctcacatatatatcggaacgtgagatcgggttctacagcattgagatatatagactagagtgtgcacatttatctggctgaatcgaaatcgcccgcgaagtacaaaatcctagtctaatattcgtgacctctcttattgattcgaaatctggtctcaatagtctcgttccagcaagggaatgcatctacaaaataatgatcgtatttttacccagttggtatgatcatatccagtaacaaataaaactccttacgttacaaagaacctagaataccgatacgtcaaaacagcgcgcaagttaagtcagcgtctgcagagtagtcgtacaactatcccaaatttgctctaggtatttagtcctaaaatacattacaaactaccaccgacggcaccatgcttaatctatcaaatatccgcccttagctttacttaagtactaatcacattgtatccaaacagcaaagataaaagatagggccgcaagatctttctcggcttggtagaccttcaaggaaagagccaagtcgacaccaataagtcattcgttcagcaacacacatagtaatatttgataccgtgataagcagtcttattagctacactaaccaataatttcaactcaccttcgcatgaccctcaggtaaaaatctcattctatcatattagctaagaatggcataagatggaatgagcttacctgtaagatttgctcaacggagacactttccagctaacaaggcagattttgaatttccggttcccattcgtacatacaattcttcaacatcaatttagtaacaacatcagctagagcgcataatttcgtcatcgcaggattcatttccaattcattaatttagcagctattctcgactcccactaaagaaggttagcctatctttatcgatatagactataccatcgggtgcctcactgatcctgacttcacccgcccgtataagcaggatggtttccgggcccagggtggcgagtgctcttccgagcccgcgcagatattggattccttctaatacctattcaatattagtctcaaatgtacctgcaagacaattgtatttaacacactggcttaacaattccaacgagttcatcggttgtaatagagcagctagaggctagaatgtggctcactgacacttccgttagttcccagattaacgtgcacaatgcgttatagtggtaaacttagagcaattttaagaagcttggataagagattccttccatcagttcttaaaaacctggggtaggagagaactgttattcaagttgttagatatacaccaactttcctctgttcatcttatgccgggcaaataccaaagaccgatcttatgatctagcagcaggctcgaaagtatcccatggattctagttaagttgtggaatacttgcagttgagcgaccaaagcgtaggttcgttaaaacagaggcgattgcagcggtagtcattatctagatatctgaaggttggatacccagagaggcagttggttttgaactcagctgctcatggcaggaagactgatccagccatacagtaggcggccggataggtttagcctgcttgcctttcatattactgtataggctttgcggtataaaaagacaaagtaagaagacaattcctaaggcaactaagactctttataaccctagaacatttcttcaatatatgcttttcttactcgtaacaatattttcaatagcaaactaataacattagatctttcccactgtatggtgaaataccgcaagtatataaaggtacataacggcccgttgatttaagcatccgtttccgttattaatgtccaaaagatagaataccgtcgtctatattagaaggtagtttatttaaaaactgaggttttgataagtctcatcgacgattgagattatgcggaactaatttaggattaattaccccctcaaatgtactgatactcggtggttacaataccaggattaccaatatgactttatttaccacataacatcgaaaagaatgtaggttctagtatacataaccattctgttcttattctagattatgtgataaggtatcccttttatcaatcgcagcaaccgtactcaccgctacggctctattctgcagaggatatcgaacaacaaaacatacatcatagactttcatcaaccattttgattacaaataggagcagatagcataaattcagccatctagtggttatgttatatttcgaaatccttcaaccggtatggtaggttcgatttgtatatgggtaggaatatgagctgctgtgacagccctaactgtactcagaatccaccgcataaatgtagggtttaccaaagtaaacggcagggcggcattctttcagacaagcgttccggttgttttcatgttctgagcggtcatcattatatattcgacaatatggtggttcataattatatcacgtacaataccttcgattcttaaaatggttaacctataaactagcaacctagattttcatcaggcttagtacttagcggttttatgccaccggaacttcgaatattcaaaatcagtttcaactccaatttctttttccttattacagaaggccctacttcaagtaaactagcccaccatatttccgccagactctcatacatcaatatatttttaatagatcatggtagattacacgtaatcccacagaatagttaacaattgcattcagcttccgcaattaacgtcaaaccctatcaacttcaactctcattttcgaacaatttttcaaaaaatagaaggacgagttacataatacctagtcatataaaaaatccgtagtgagatgtnnnnnnnnnnnnnnnnnnnnnnnnnnnnnnnnnnnnnnnnnnnnnnnnnnnnnnnnnnnnnnnnnnnnnnnnnnnnnnnnnnnnnnnnnnnnnnnnnnnnnnnnnnnnnnnnnnnnnnnnnnnnnnnnnnnnnnnnnnnnnnnnnnnnnnnnnnnnnnnnnnnnnnnnnnnnnnnnnnnnnnnnnnnnnnnnnnnnnnnnnnnnnnnnnnnnnnnnnnnnnnnnnnnnnnnnnnnnnnnnnnnnnnnnnnnnnnnnnnnnnnnnnnnnnnnnnnnnnnnnnnnnnnnnnnnnnnnnnnnnnnnnnnnnnnnnnnnnnnnnnnnnnnnnnnnnnnnnnnnnnnnnnnnnnnnnnnnnnnnnnnnnnnnnnnnnnnnnnnnnnnnnnnnnnnnnnnnnnnnnnnnnnnnnnnnnnnnnnnnnnnnnnnnnnnnnnnnnnnnnnnnnnnnnnnnnnnnnnnnnnnnnnnnnnnnnnnnnnnnnnnnnnnnnnnnnnnnnnnnnnnnnnnnnnnnnnnnnnnnnnnnnnnnnnnnnnnnnnnnnnnnnnnnnnnnnnnnnnnnnnnnnnnnnnnnnnnnnnnnnnnnnnnnnnnnnnnnnnnnnnnnnnnnnnnnnnnnnnnnnnnnnnnnnnnnnnnnnnnnnnnnnnnnnnnnnnnnnnnnnnnnnnnnnnnnnnnnnnnnnnnnnnnnnnnnnnnnnnnnnnnnnnnnnnnnnnnnnnnnnnnnnnnnnnnnnnnnnnnnnnnnnnnnnnnnnnnnnnnnnnnnnnnnnnnnnnnnnnnnnnnnnnnnnnnnnnnnnnnnnnnnnnnnnnnnnnnnnnnnnnnnnnnnnnnnnnnnnnnnnnnnnnnnnnnnnnnnnnnnnnnnnnnnnnnnnnnnnnnnnnnnnnnnnnnnnnnnnnnnnnnnnnnnnnnnnnnnnnnnnnnnnnnnnnnnnnnnnnnnnnnnnnnnnnnnnnnnnnnnnnnnnnnnnnnnnnnnnnnnnnnnnnnnnnnnnnnnnnnnnnnnnnnnnnnnnnnnnnnnnnnnnnnnnnnnnnnnnnnnnnnnnnnnnnnnnnnnnnnnnnnnnnnnnnnnnnnnnnnnnnnnnnnnnnnnnnnnnnnnnnnnnnnnnnnnnnnnnnnnnnnnnnnnnnnnnnnnnnnnnnnnnnnnnnnnnnnnnnnnnnnnnnnnnnnnnnnnnnnnnnnnnnnnnnnnnnnnnnnnnnnnnnnnnnnnnnnnnnnnnnnnnnnnnnnnnnnnnnnnnnnnnnnnnnnnnnnnnnnnnnnnnnnnnnnnnnnnnnnnnnnnnnnnnnnnnnnnnnnnnnnnnnnnnnnnnnnnnnnnnnnnnnnnnnnnnnnnnnnnnnnnnnnnnnnnnnnnnnnnnnnnnnnnnnnnnnnnnnnnnnnnnnnnnnnnnnnnnnnnnnnnnnnnnnnnnnnnnnnnnnnnnnnnnnnnnnnnnnnnnnnnnnnnnnnnnnnnnnnnnnnnnnnnnnnnnnnnnnnnnnnnnnnnnnnnnnnnnnnnnnnnnnnnnnnnnnnnnnnnnnnnnnnnnnnnnnnnnnnnnnnnnnnnnnnnnnnnnnnnnnnnnnnnnnnnnnnnnnnnnnnnnnnnnnnnnnnnnnnnnnnnnnnnnnnnnnnnnnnnnnnnnnnnnnnnnnnnnnnnnnnnnnnnnnnnnnnnnnnnnnnnnnnnnnnnnnnnnnnnnnnnnnnnnnnnnnnnnnnnnnnnnnnnnnnnnnnnnnnnnnnnnnnnnnnnnnnnnnnnnnnnnnnnnnnnnnnnnnnnnnnnnnnnnnnnnnnnnnnnnnnnnnnnnnnnnnnnnnnnnnnnnnnnnnnnnnnnnnnnnnnnnnnnnnnnnnnnnnnnnnnnnnnnnnnnnnnnnnnnnnnnnnnnnnnnnnnnnnnnnnnnnnnnnnnnnnnnnnnnnnnnnnnnnnnnnnnnnnnnnnnnnnnnnnnnnnnnnnnnnnnnnnnnnnnnnnnnnnnnnnnnnnnnnnnnnnnnnnnnnnnnnnnnnnnnnnnnnnnnnnnnnnnnnnnnnnnnnnnnnnnnnnnnnnnnnnnnnnnnnnnnnnnnnnnnnnnnnnnnnnnnnnnnnnnnnnnnnnnnnnnnnnnnnnnnnnnnnnnnnnnnnnnnnnnnnnnnnnnnnnnnnnnnnnnnnnnnnnnnnnnnnnnnnnnnnnnnnnnnnnnnnnnnnnnnnnnnnnnnnnnnnnnnnnnnnnnnnnnnnnnnnnnnnnnnnnnnnnnnnnnnnnnnnnnnnnnnnnnnnnnnnnnnnnnnnnnnnnnnnnnnnnnnnnnnnnnnnnnnnnnnnnnnnnnnnnnnnnnnnnnnnnnnnnnnnnnnnnnnnnnnnnnnnnnnnnnnnnnnnnnnnnnnnnnnnnnnnnnnnnnnnnnnnnnnnnnnnnnnnnnnnnnnnnnnnnnnnnnnnnnnnnnnnnnnnnnnnnnnnnnnnnnnnnnnnnnnnnnnnnnnnnnnnnnnnnnnnnnnnnnnnnnnnnnnnnnnnnnnnnnnnnnnnnnnnnnnnnnnnnnnnnnnnnnnnnnnnnnnnnnnnnnnnnnnnnnnnnnnnnnnnnnnnnnnnnnnnnnnnnnnnnnnnnnnnnnnnnnnnnnnnnnnnnnnnnnnnnnnnnnnnnnnnnnnnnnnnnnnnnnnnnnnnnnnnnnnnnnnnnnnnnnnnnnnnnnnnnnnnnnnnnnnnnnnnnnnnnnnnnnnnnnnnnnnnnnnnnnnnnnnnnnnnnnnnnnnnnnnnnnnnnnnnnnnnnnnnnnnnnnnnnnnnnnnnnnnnnnnnnnnnnnnnnnnnnnnnnnnnnnnnnnnnnnnnnnnnnnnnnnnnnnnnnnnnnnnnnnnnnnnnnnnnnnnnnnnnnnnnnnnnnnnnnnnnnnnnnnnnnnnnnnnnnnnnnnnnnnnnnnnnnnnnnnnnnnnnnnnnnnnnnnnnnnnnnnnnnnnnnnnnnnnnnnnnnnnnnnnnnnnnnnnnnnnnnnnnnnnnnnnnnnnnnnnnnnnnnnnnnnnnnnnnnnnnnnnnnnnnnnnnnnnnnnnnnnnnnnnnnnnnnnnnnnnnnnnnnnnnnnnnnnnnnnnnnnnnnnnnnnnnnnnnnnnnnnnnnnnnnnnnnnnnnnnnnnnnnnnnnnnnnnnnnnnnnnnnnnnnnnnnnnnnnnnnnnnnnnnnnnnnnnnnnnnnnnnnnnnnnnnnnnnnnnnnnnnnnnnnnnnnnnnnnnnnnnnnnnnnnnnnnnnnnnnnnnnnnnnnnnnnnnnnnnnnnnnnnnnnnnnnnnnnnnnnnnnnnnnnnnnnnnnnnnnnnnnnnnnnnnnnnnnnnnnnnnnnnnnnnnnnnnnnnnnnnnnnnnnnnnnnnnnnnnnnnnnnnnnnnnnnnnnnnnnnnnnnnnnnnnnnnnnnnnnnnnnnnnnnnnnnnnnnnnnnnnnnnnnnnnnnnnnnnnnnnnnnnnnnnnnnnnnnnnnnnnnnnnnnnnnnnnnnnnnnnnnnnnnnnnnnnnnnnnnnnnnnnnnnnnnnnnnnnnnnnnnnnnnnnnnnnnnnnnnnnnnnnnnnnnnnnnnnnnnnnnnnnnnnnnnnnnnnnnnnnnnnnnnnnnnnnnnnnnnnnnnnnnnnnnnnnnnnnnnnnnnnnnnnnnnnnnnnnnnnnnnnnnnnnnnnnnnnnnnnnnnnnnnnnnnnnnnnnnnnnnnnnnnnnnnnnnnnnnnnnnnnnnnnnnnnnnnnnnnnnnnnnnnnnnnnnnnnnnnnnnnnnnnnnnnnnnnnnnnnnnnnnnnnnnnnnnnnnnnnnnnnnnnnnnnnnnnnnnnnnnnnnnnnnnnnnnnnnnnnnnnnnnnnnnnnnnnnnnnnnnnnnnnnnnnnnnnnnnnnnnnnnnnnnnnnnnnnnnnnnnnnnnnnnnnnnnnnnnnnnnnnnnnnnnnnnnnnnnnnnnnnnnnnnnnnnnnnnnnnnnnnnnnnnnnnnnnnnnnnnnnnnnnnnnnnnnnnnnnnnnnnnnnnnnnnnnnnnnnnnnnnnnnnnnnnnnnnnnnnnnnnnnnnnnnnnnnnnnnnnnnnnnnnnnnnnnnnnnnnnnnnnnnnnnnnnnnnnnnnnnnnnnnnnnnnnnnnnnnnnnnnnnnnnnnnnnnnnnnnnnnnnnnnnnnnnnnnnnnnnnnnnnnnnnnnnnnnnnnnnnnnnnnnnnnnnnnnnnnnnnnnnnnnnnnnnnnnnnnnnnnnnnnnnnnnnnnnnnnnnnnnnnnnnnnnnnnnnnnnnnnnnnnnnnnnnnnnnnnnnnnnnnnnnnnnnnnnnnnnnnnnnnnnnnnnnnnnnnnnnnnnnnnnnnnnnnnnnnnnnnnnnnnnnnnnnnnnnnnnnnnnnnnnnnnnnnnnnnnnnnnnnnnnnnnnnnnnnnnnnnnnnnnnnnnnnnnnnnnnnnnnnnnnnnnnnnnnnnnnnnnnnnnnnnnnnnnnnnnnnnnnnnnnnnnnnnnnnnnnnnnnnnnnnnnnnnnnnnnnnnnnnnnnnnnnnnnnnnnnnnnnnnnnnnnnnnnnnnnnnnnnnnnnnnnnnnnnnnnnnnnnnnnnnnnnnnnnnnnnnnnnnnnnnnnnnnnnnnnnnnnnnnnnnnnnnnnnnnnnnnnnnnnnnnnnnnnnnnnnnnnnnnnnnnnnnnnnnnnnnnnnnnnnnnnnnnnnnnnnnnnnnnnnnnnnnnnnnnnnnnnnnnnnnnnnnnnnnnnnnnnnnnnnnnnnnnnnnnnnnnnnnnnnnnnnnnnnnnnttgataacccccgagccgatgaaaccagggcagagcaggagtagaagcagcagtagaaggtttctgttaggcagccttcacttcgatagctttgacacttgagcttcatgtgcttgggtacctgtggagacagacaactttggaccgatagtcgagctcaatttaggatagaagcagaccgagtggtttgacccagacgaagttaaatctatgacataggcttttcccacaaaactttgtatacgagtagttttaacagtttagggaagccatcctatataccaattccattcagagcgaaagagtacaatttgatctagatactaagtacagaaggggaaagagaaggagagggacgctaattagctggtacagggctttttgtgggtttaggtataaatcctgcaaacaggggataactcagccacgaagctcagggaatcctccaacttcaagtctatacagtgacaggtagcagaacacctagatcgtcacatatccatccagccacgagactccaatagaagccaatgctaaaggaagtagaagacatgggcttcaaacagtttctgtataacctgcaggatctggtattaaacgtgaaacagaaagtagggaaaatcataccgaaatcctggtaagtagacgacggaaaatcgtggtcatgcgagtatattagtcaatttatatagcagaaagatttccaaaataacaatagctcaaaaataacaatttaatgggataccattcataagcgaatgcacagataaaagtcatataggtctgtaaaagagcctatacagaaacggtatcaatcttggtttctaggcgctagggttgtcaatttttaggtaacaaatcctcatatagcaaatctttctttttaggccagggaggtaataggagctaaggaatttagacttccggcaatctatgatcaaatctgtgaaacgatacagcctgcgagctggcaaaactccctaactacaattcatcgcatatatataagtaactcgttaactaagagtgaggtgaccgtttgagtgggtgacatagattcctcatctttccaagtaggtgataacatcatattactacgggctaatcaactttacggtagctctcttatatcacaaaccccaccttaattgtttcgttagattacatggaagcatcaggcatataacaacgaccctttttccttcatagtaccttaatatttcgtgaacaaacagtataatcgcgctagcgatcttgattctaagcagcctactacttgcgattccagtggtataacccttttaccgtccgtattctaaacatactaagtatataccaggcttccagacccttaaaggcaatcatattcccaccagagctggtagtaagcaatgcgatttatatagctcgatatcgccgggacttgcgctaataatcttttgcaatttacaatatagacacctatcccactacccgcacacggcataaggcgagactacaatctgtctagtaagccaacaagtaagaaatgtaatacctctagaaatagtctatatcctgataccatgttctagtttctatcgatccaaacgcgaaacacggtcggctccaccaacatctccgggcacacgttacacgtaggtagcattagaaaacagtcacagggcgatggttattccgtttcatcgttactgctaggtcatttcccctattcaactgaagatagacattaagtttctatcttcgataactctattaggcctagcgttactaaaaatagaatttgaaaaacaatcaaaggagcaaaatggtgatactgagactattatatacaacagattctattgcctagctactattctgagctctatattcttgaggtacaccagggatctactgtgccctaaagtgaactaatcgaggacagagaatttatattgctacgagaccatacaacgattattctccaagtgatgcgccagagcttcccatttctggttctaacgagttggaggaca

SEQ ID NO: 19 - DNA, 89350 bp, Penicillium roqueforti
  misc_feature (21055)..(26782): n is a, c, g, or t
  misc_feature (30124)..(31815): n is a, c, g, or t
  misc_feature (36457)..(42376): n is a, c, g, or t
  misc_feature (65640)..(66338): n is a, c, g, or t
  misc_feature (74715)..(74862): n is a, c, g, or t
tagcacgaggtggtgggtaagtagggtcggaagaaggggtaggggttatgttggtcgatatgttcaagtggcctcgagtcggcccgtcgcaatggcgaaacgtatggaggcctgtactgcctctaggtttagcgtccacttctgatcatcagaaggctgttttccgcccaggaagaaagatatgtttcctcggtgagtctgcgtgcattgtaacatttccgtccggtacgtcatccacttccgacatcggaaaaggaagtactctacagtctctcttgcttgtccgcaatcgcattgatccgtctctactatattaatttgattgagatacccattgagcctagccatgccggttcggagctgggccagtacgctcgcttctttccacgttaggcaatcatacaactaccgggtgtatttgcctagcagtgcggcatctactcgttttacgtgtcttcctatgttctctggtagctcactgctagggactgcttaggaccatgcgatattcaatgttatcgacttcatcctcgagacgtattcttataggagagcatcttcttatattgcagttctggcctattctttagctagacctaacagcttgttatcttcggtagtagggatctagtggaactcgatacagtttccgttcttccgcaaccttctcatcaacttgtacatctaacaaacaaactcctggccagactattatcgggggtttcttagcgtgagcaccgccgccttattgcttataagcaacgtagtcctgtagtccttaattcctactatcattttcaacatatataccatagctgccagctccgcagagaacgggttctactctaccctcgcgcccaatatgatagaaaacgttttgagcttcaattttcgatttcaaggtagctatttctcgattgcgactctaaatcccaccagctcgttccgtgccgagctactaaccgcaatctatatcaacccgcccactttagtctggggttcatattgtccatcagtattggtctatacgcgttcgtcccatagggccaacgtgaataggtcaattgtttccagtatctctatatcgatatacctaagcgcatctgccacttagtacagtagcgagcgataatatcgtctgaactttctaatccagtctatacctctacagagtgggtttatttcaggaaaggtatatatatccgtccacattttcacagcccgtctccagaatcggttccgcgcggtggcaatataggcctccgcctccgctacgctagttacaacggtaaggaatgtccctacaatagcttatgctctaactctttagactcaattaatcggccccatagccttatccttacacacgtacatccagacattagaggcgtagtctataactagcgccactgtcgatataaataactgccgcgctgttactagggaaaggccataaagtcgccgaagctctatcgctacctctaggcccttagatacagccctcgccatatattccttatatttcagtctcgtatccatcaagacacccaggatcttaacgtgctctttagacacaaccgtctgttccttaatgataaacgacttatagtccaatttatatatcttaggagcaaagtgtataatagctatcttttccgctttaaaagttgctctacttctcctttcccaatcgagcgcctcattgataattgcctcaattccttaccggttactctacgcggttggcccagtcacccatacagtaaaatcatccacaaaagcgaccgctcctccttagctatcaatctatctttatacaaggtctatattaaagaaaaggaataggatcggagataggggtaagccctaaggcaggccagcttaggataatctttaggccttagaaagctgcccgttaatctagatagtagccgttcgctctaagtagaataccttaacctaccggagcaagtcatctaatatacctcgcgcttttatcctctagagcagttgttctttacacactctgttataggcacctttcacattgaagctaattaagcttaatacttgtcggccacaccatgctacatagatctactcttaaagaagcacaagcgcttgctctatagatcgctacttttaggtaccgaagtagctggtcgggagcaatccgtacgtttccactatatataagattctttcagtaaccactaattcgagtatctttcctagtatcgctaggagtaagatcggcctccacgcctttacaatagtataattttctttattcggcttcttaagcggtatgatcttcgtatatctctattatatcggtaacgcgccttctctcagtaatacctagaatagatcgagaaccctatgctagacagtcggccacgttatcttctagactattaccggtagaccatcttcgccgggtgccttctatgattttgtagcaaaaagctgtctttcgatctcttctataccaactgtaggtatcctcactggttctctctatagtctcgtcccctcatcttcaatcccctctagcagaggggggaagaacttagacaatagctcttctgcttactccttatagtcagcagtagtagtcctatctactctgacgagctacggtagtttcccaaacgccacattgtccccagacttcaggtacttagcggctttctagatattatcgttatctgcaagaaactcattctaatacttcttcttttacttacagatagcattataatattattttactacatcctaggccatcttttcaagctaaggtactttacaccctatccgtcattctaagcgagcgcgattgcgccagtatatatatatataacagagttatattaggtcggttatctaccaccgcttcgcgtatagcgatagtctcgctcttagagttaacgtatacactatatctaagactgcagacatcagttggtcggttttctgctatactatgccttccgatagagtaatggctagagtcctcgcaattctagcattaatctctttctatagcgcattctttagaagaagtcgttcctgatatttcagggctagctatagtatatcaaataccgtcttaatcatccggtaatctaagccgtactcagtcccatatattacgcatttagtcatcaggtctaccaaattatcggaggctaggataaggtcaattgtggactcgcagtccctatactatccttcgccataccatattttcgtgccttatttaagtaagctacttagagcaaattcactcataaggtcaatgattagatccgcttcaccttatcttcctaaggacacctcgtctccgccccagagttaatcatagcggttgaaatctcctataatcatgatattcactactgcacctatatctcgccgtaccatcgcaattacccttctcaggtgaccatacgcgtcatacagagccaaggaatctcccccttcgacgtagaccaatactataaagatcagccgttcgggtagtcggataaccgctaccgtcagatctagggacttaatagccacttactctacttctatatctttattaacctaaagcatactctagatcgcctatctgccttccctctaggaggagggtactatcttcatctatttataatatcccattagggtagtcaagagttgtccctaaatcctccttacctagggttcctaaattactaacgccactacatccttagtttattcgtcgtttattaagctttcatacacagcaccctacttcctcacattcaattagattattcgaagtattttattcataatatagtaggtagagcttccggcaattcttactaaacgacttatatggcccactgtatagaacacactttagaacctcttgatcgcagcgactgtagtaatgaccctctgaggcgcactttacatacttctaggtcttccggtattagaatgccttataaccaatctcctaatagttataacattatatcggtcgtagctgatatttaaagacactagttatcctagactcccctctaacgtagaagtatccgttggctaagagcctctatatatcggagcctttagtgaggtacacgaccatcgagctatatggcttcgcggcttccttactactaagccacatcatcttagcgactatactttcgttttctttactcagtactacagctactccagccagaatggcatagttattatctagcaccgcagccctcttaataccgttgaccttaatcaggtagagctcgtcccagagcacctaggatcttattccgatcttttcttctaccactttcttaaccagctagtactcggctttatcacaacacgcaatcctgatccgattggggtctcttagactcacggtaaccgcgcggcagcgccagtaggtataatcatccatcgttcggatctctttctcgattacagccctgattaagcccacggatatcttttcattttcattttcggtcatcttcgaggtaactatcgtacagtacaaagtttcggtaaaggtggtcggtattgtgcccagcgttaacagtatccatatattgcttaggtaactagttagaggagtgcgcgcgacatctatataggatagggaactcgtaggagcgggaacgctgatttcttcgcgcaaggattgaatctcgcggagaatcgcatcatagttgttctaagagcatgcctcagagtggcattacggtattaagggtctatcagtcaggttctatagcttatatcggacctcagcgagagtaacactaatctctacttgggcttttagtagttcttccttatgtatctcatcgcggagtctgatctccctcctaagtttggcgatctcttgcaccagattgctgacatcgaggtcgccgttggaggagtgcgcgcgatatctgtataggatggggaacttgtgggagcggggacgctgatttcttcgcgtaaggattgaatctcgcggagaattgtattatggttgttctgagagtatacctcggagtggcattgcagtgtcaagggtctatcagtcaggttctgtagcttgtgtcggacctcggcgagagcggcaccaaactctgcttaggcttttagtagttcttccttatgtatctcatcgcggagtctgatatccctcctaagtttggcgatctcttataccagattgctgacatcgaggtcgtcgctctcggtcgcggagttgtccgaagttgccacgttaggctggtctttgggttcgattctcttctttggtagcggtcgcgtcttcctctgctcgttatcgatctcttgctctcgagcatagtttttcggtggtttggtggtgcgtttcggtctcgacagtcgcggtggcgaatcctcgcgtttatcgcggtcgggcggatcaggggttcgcatcgcggcccgtcccgtcattactcacttgatacgggaggtcggtattttcgccacgtggcacaaaaaggctatcactgggcagttctctaaaatttagtacagtcactgtcgagtacagacgccggatgcgttctcgtcgctgtacagtctgtctccgtgaccctatacagtctctctttgatcctatgggactacagtagatttcgaaaacggcttccccgtagaacactcccggcttgtttctcggcccgtacccgaaaccacactagcccaatttcggactagtggtaagctaacatatattgtgagccaagcatggtcaataccaaatccaaattcgaaatagggtggtttcgggtacgggccgagaaacaagccgtgagtgttctacggggaagccgttttcgaaatctactgtactagggtaatgggaccggaattcttttagtcccataggagtagataggaccaggatatgggaccaaaattttcttagtcccatgggagttggcaaggtctagctaagacctatattttatgcaagaatgggttcaaatgggttgttattgggttattaggtttaacctattgggttttgggttctgccgaagtctataccgatctagttgaaaaacttctaccccctaccacagattaaataaaatagataaaaataagtgggtctcacattcgagttaatacatagtatgggtaggtgcaaaagataaaataatcataagtttcatcatatagaggttccagtatgtgcctgtattcggctaatagataaatacatttgtagagatctacatatcactgaaccatctcatacattgttgtacccagtatttctgtcagtataggtaagcaagccaaatccgacggtccactcaacctactccaaatccgcacaggatttgggatactgtagggcatgcttaatccggctgatgagcttctcaccatccacctcgaagacatagttcacctcccggataccctggggcgcaagtgccttctggtacacatggatgtttccatagctgggactgccatacgatgtgtccacatccagatatacttgaaaacgttagtcataatccatggcatctttaatctaccttccatatgacatacctgaagtctggttgacagagatagaagggtcgaccatcagcgcagcagctgtttcatcccagaaaggcaatgacaggtcgtaatacttatagaagagctcgctgtatgggtttggaaccgagtgaacctcttccaagaactccttggtcgggaagacttggttggcaacattcccggcgatggtgatattggggaaatccgccgtcagggctatcttagaagcttccgggtcgatcatgagattgatctatattttcaggagtcaacaccatcataggatcattcgaagaatactaacgtcagactggtgatctgcaagcatgatacttccagtggcctgaagcatgttcaggtcgacataccctcccataatcacaagatccttggcaagtgacgcaaactgcgggtccatacgcacagcaagcgcaatattggtcaaggcgccggccgagtatatggatacctggccgggatacttgtgcaccatctcgaccatgaagttagccgccgaggtggagctttccggtcggcccttcgggaagccttccttgaaagcttccttgacgatgcggttcggatcgccagaggtaggatcattgccctcagcctccagagtcttattctcgggcgcaaaagcaccttcccagggcagtttgccatggatcatctcccatgctcggaagcggtggggggtattgatcagcggccatgtcgcacctggatagactggaatacagctgagattcccggcctctagggttgccactgcgtgcaatgcgccctgtggctgccagctgttggcggtatcttaaagttacacttagtgaacaattgcgccaatgcagtaaaatttagatacccacctgaggccaagcctaggatttccacatcgccatcaagagcaaccaaataaggtacaaagcccactgtataccaatcattgtccataatggcatagtgcctatccgtccgccccagcgcaagcgagcccgtgacgaaagtaagcattgagctgcagagcagcggaaccgaggtcgaccaatgcattgcagggatgaagcgtagtcttgctgaattgaaagaagggaatatacaattccgtatgaagcgcagaatcgatttcaagtaaataaaccccttcacccccggaagcctttatacctttagattccatcttaaccccagagttccccagagtttcttatccaattgtagtcatcaatcagcatggacacaccaacttagagaagcagtggctacggtttcccagaatggacgttgtgtctggaccaccccacaatttcactgcagatttaatgtcggtttagggccgagtgggaccagttaagccctcacagttgggctaaaccattcagggccccaaccctctccgaatttaccctacacattcccatgaataggtcgatagccggattattttaaatggaaacatattggttcgctattactccattctccgcctcgggtaacacatcgaggtagcccgatatcgtcatgcttcgctatttattccgactagcttaatactgatcactgacgattgatctggggtttccaaaatacgaacgactgttcttataccgagtatctggcgtcctacgaccaccgacaaacggaatcagagggtcggagaaatcgacactcgggactgcagatgacggtatactctagaatttaataggacgagggacctctgatgggtcatcatggccctctgatgaagactgtcgtccgtccagagagaaataggcatttcttcgagacgcgtctagctcccggcccttttttatttggaagttgcggctcaagtcatccacaaattatgcactattcgagatcgatttactgtgatggtgctataaccctcccaacggccttaatcccgagcgaggtggcacgaattgtcctgcactcatcacctacatcaacaagtcagtcaataccaagaaatcaagatcagtcataggtgacacgtatttctccgtttctgacatgtcgagcatctgttcttaacccattttcttggctgctagcgtgggtctccagggcatgctattcagatgggcactgtataaccttagacgaacgggatatggagagaaagaaatgatcgttggctccgatgtgcggtcaactgccgaagcgggcgctgattcgggtccatcgtggagctaacccaaatcgggagagtcgagccgaaacgcgaggggaaaaccgtggaggaacccgagcgctaaaccttttcgagcggttcatagcctacaatccccagaacggtcaatgtttgaatctacaagctagtagatgagatcatgaaacatgaaacacaatatgatgatattgtggaagctgtagagctataaaagaggaaggaaaggtagatcttgagagtgtactactatgggcacagtcgtgttgtggtccctagcgggctccagggccaaatacatatgacctttgcgccaacgcccctctgcggagcgtaaacagcagacttgcaggttgtaccaccgccaatgaccaatgtagggtgagttgtcagatgaattttgattttgggatctgcatggagtgctcgctctattgtgctccagtgtgtatttgttccaatatacagctgcttctcctcgcctctgactagattcggttgaacgtagtttgtgatcgttgaagtatctgttctcggtgtttttattggttggctgatggcagaggggtgtctactacgtccgatgtgaaagtataaatcattgcagcagcttatagatatctttaacgtatttcacatgcgagctggacacccccagaacatgcaaatttagataagccgagatctaccgatcgtaagtagggagtgagtgggcactcaccttggtgctaaatgacagtatcgcgtagtccgagatccagaagacgagccaagattgcaaaatcattcacaacaaacttcagatcgtaaaacggtctaattggctgtaatggggttatttttccagtgggctgttggcacttttgtctctattggataatagtgatagtgatcaacgcgatagtcgggagagttagtcaagcctcacggcgttgaggtttagaccctaagtattcaggtccatggcctgaacctctacaaacatggtatctaggcttagtgctcacagatcggtcggcgaggtatagatgttcagactcaggaataccaaggtcatgtaaataactaacttcaaggaatctagtctccgtcgctcatcattacctggcggttgtctgttttggttatttttctgctaaccggattgggagcacccaacagattgccctcggtctagttaccctccgatatacaatcgcaattactgaattccattcacccagctgattgcattacatcaaacctatatccgcataagcaactagcatgagccgatgctggctcgttacctttcttgcgtagcggcccactcaaagctggcagggggtagtcggtgtggtgaagtggcgctccagaggccagcttataagcgaaccctgagccttatcacattgtacagaactcctttcaactcgaagatctgggctatggcgctaaccgggttgggcacgccaacctgggtgctcttgatctggttagtctctaaaatttaacctcatatactatatagcctgcgcattggctgggtgcataagtctttaagttgccgatatcttgtgatataaatcataagcccctaagtagaaagaatccctatgaatacgattcttttaatacgggcctgcaattgaatatgaaaaagctcctcttagcagcaatcatgtatcttaagctcttgaaacgggaggtaagatttttatttcgctctaaggaagttgttaacttgaccagccctgagacaccttccacatccagcactaggatgacgcggatcacccgcgacaatattagtccagatccagttagttattctgtaaattttactaatctatttccgatacatacccacaaagcactgttgcaattggcttggttccgggcactccgcgccaacatccgggaataggtaagagaagtcaccgttcgtatagatcatatagatctatgtcgagtcctgcgacccccttcccccctggagagtgggacatgacaaagatgcccttttaccgccttcgtttacacctaaaaagagtatccaaaagaccaccaaaaagacatcgtagaagatgatacaattgtcatacgaggaaagatctaatacctaggcacgaaattctagtgggaaaccataaaatttgctaggacttgcaagcccactgacctggggctcgctctcagggacctcatcatatttcgcactgtggtgtcccgaactgtggtgttccgtgccatggtgtccccagccgtggccatgtttccgcccatgacccctggcgattccggtaggagtgccgctcgggattgcactgacaacactgcttggaattgcgctctgggcatcagtggggacttcgctcaccgcgggaaccccactgggcccactgggggtgtcgggagtataaatagcagtggcagccggaagttcactgtctggtccacttgcaatcacatccacaatgccactggccgcggagctggtaacggcctttgcgacttcgatcacagaactgctcgatggattcccaaatccgcttccgatggcggcgacactcccacttgtagccttggctgcgggctcggtagtctggcttatggctttgattgtggttgcacttgaagcggcttcggtaatctgggttggggctttgacggtggtctcgctcgaagcggccttgatgacggcactcgcaccctcagtaatggcgacctttgcggtcgcgctggtggtgacactagcagccgtagttgtcggggaatccgttgcaccatcgcggcctacgcaagcaatgctcatctttttgccagtcgcagaggacgaggagtcatcaatggactgcgagaggtcccaagtcatgttgacatagggccagcaaattctaccatctgacatagtcaccatgtcaccagcaacgtaaacatcgtcagcactgaaagcttgaccaaccttggagccggtggagtcaacttgctggaagtaagttccagcaaaggtaccacggcaccccatggcaatgaagtcacaagtcaggttcgagatttcctcccaggtgacgagagcattgctacttccaaaggcggcagcgtgagcgtttgagcaatcgttcgatccagagttcacccagttgacctggctatctccatcctcggagccgacctcagacgtggcctgggcgccaaccttggtatacttatcagagaaaagcgaaatagcaacattgcgaccgttcgtgcggttctgcacattcgtgtagccacttcccatccaggcgttctctgtcacatcaatcgcgccgcgggaaacccaggcgaagatatacttggtagtatcggcaaaccgagccaacgcactgtagctaccagacataccacccataggctcaccagacgcgccgtttgtagtgttctcgttggaaattttgactccatcggtggacattccttgcgtcttggtgttcaaccagatcgcgtagacaattttccaagcaaattcaacagagatgatttttgattggtaatttcgcagtcatcaggtcgacctttttttccatttacttatacattactcacggctttgtctctaacccgtaaaattgagccggtccagcgaaatgtttaccggtgcctgcgcgcgcccgcagtttcttgccggccctcagttagatgagcacggccaggtgtaaccggcagttcaaacagctttgccctcagtaatacatccttcacttgagtctagtacagagttagaacagttcaatgcgggtttgtttattgtgattctagtcgcatggttgaagacagctttttttgcgatggccaatggctctccctaaaaaaaaaccaatttagcgtgatgcggtagattggcatataatatataaaaaaactatttcctcgacttacaatggcgatattcaactctctatctttctacctgaatatagaggaacactgaatccttcgagcccaatggacgctcctgcttcccactctccttcgggccggactaataaaagaaagcgaggagcaccagatccatataagaagccagtagggataccaggcagcaccaagcaagtgacaaaggtcagatttcactgagtccgtatttgatcggctctaaccaaaaaaacagacaatctcgataggtgcggtatattccctaaccagtgatttgaccaaaatcctacaaaaaaaacccgctttagtatcttccgctattaacctcctagacctctatttatacctgtaggagtattacatgatcaagtccgccggcaaaatacgcttagaagaggaacatcgcttcctacaaggctctaacaaatggctggtaggagagaatgagaagctccaagaatgctataataaccaggagctgctactgtaggatcgtcgtcaggcctttgactctatatatcagggtattctcagaacattgcagaatagtaatagacgctattatcatataaatgagttacagtaagtttttgcttaagcgaaataagatcggcacgcttaacctggctatgactagtattatactggtaggcaacagagtgataaataggtctcgtggttcttacgttaaacagaaaaggcaggtaataaactggtcggaaaggatagttcaacggggtagagtataggtggggcgttctataggtggtatcatactaccaatgaatgtacttttaacacaaaaacacaaatcgagtaccgtctgtatctatatgaatcaagaacaaccaattactaacacacagggacttttgttaaatatagctaaatatctggttttgtttggtttttttcctgtatttacaaataaacgccttactaccccctaagtactaaagctctgcgctaaaccttagacttacttacctgtcattctggcctataaatataaatctctaataaaaccacagagattttctcactctctaaacctaccttttcttcgcaaaccactttttattgtacaatctcacatactacgcagaaagaatagggcaacttaatcaacttggttagttgaaacatcttcgatagctagtattagcgctgataaaaccctttagacttcgatttagatctagaccttaagtcaatctagagagaatcgccgaatataccgataccaccaccttatctcgcagccaatcgcagcactctcagttcaatccaacctattagcatatcataatatacaaaaaataaggccgagaggcctcatgctatcgagtacattttctaccctaactataatagcgagtgcgcctttagctagacggggccggatctgttatccctagacacctatgccgatgatattttcctctacgtatcagcattctttctttttgaacgggtacactagatagaaatccggcttagtaagcttagcacaggaaacaaagaggttgtagaagagtatccgttctttcttctgtaggttaaatcgatattagggaacctacacagagtatgtggttagatacataatatcatctcgcggaatggctatataggaagtactggggaaacccaatttcaattatctttacgaccgtagatagagactgtagcagatcctggcatatagagcgcgattcctctatcttacatccatccctctctacctatagcatcgtttgatccacaattctttatacagaatattgttaggaactagggaatataagtgctctggctcttagatagcctaatatcataatggggtctattttgacccttctatggctttattaaactaagataaaggggccatttagatttgcagatttttagataataatcttaatagaataaaatatagataaccattgcgtttactaaatgatatatactatcttttgtggttatcttttcatttataagaagccctaggtttcctataaccggtgatatataaataggggcgtattatgatatatagtgttagagactgcgggaaatcagcgcgttagagatattctgtaccagaaataagtcggtgaccagtgctatagcgatcatcggtgcgagtctatttatagattgtatggttaataaagaagcagagttcgaatggacccatcagaaggacaggaactcacagcagttgaacgggtttattctataagctacgtaatacagaaacattgagtgaaatatctttttttttttactgttatttttctgctattacgtcgggcatgtacagaagatgattataacctataagcctggttacacgtttattgtatctggaagatctattataaaatagttatagatatttaagtaaccaaaccaccggtatagtggtcatttggatatattttagtactcctgtaacgctacctaagctagtttataagtaaataagaactcagttactctctatactactttagaccttatcctcataataacacagtttatatgggccatttgacttctagggtactcctctatggtaaattccttattatagttataaggaacgtttatctattttctagaaacgtatataaggagtaagcaggaatataagtaatacactttttaaccaaatacatatatcaagatcctaatctcacagtgcattccctcctcttagtattttccttattcttttcactataagctttcgatcatatactaacccacacatctattctaaacttcatattactaggacctattgtggccctatttagccacattccctttatcatagcttccttactcctaaataaatatactactacagctagctttaataataaccatagaaataggcttattttctgctacttcatggcatggcactccagtatcccctattgaatcgtgaatccaatactaactctcattaggttggtatcgttagtaaccgccagagtgctagcaactataacgacgatataaagtgtgcccaatatataggcatcgacgctttcgccttgaacatcagcactgattcttatatagacgagcaactagggtttacatatcaatctgccgccaataatggcataaaagtattcatctcttttaacttcaactagtagtagactagttagggtaatacagtcggcacaaagatcgcatagtatactaatctacctacccagctcaaggttaataggaaagtatttgtgtcttcgttcgccagtaatagtatcgatatcgtagcgatcagagtagctaccgacagcgatatatattttatacctaatttccaccccagtcggggtgattttagcaaccttcaggctactctaaactggattgcgtagggaaataatggaaacaataggtcttcaactcctagtaagcagctcgctattaccgatagtaataatacttacaatatagctcttaacgggaaaccctatatcgcgtataagtggctcgaataaggtattttttcttcttatgctaattcaaaattagcggtctcgccttagttcttaacacatttcggcggcgaagtctcttacacgaaaaactgggtatttccctctagactcctgtggtataaccgatagagagaaattctagctactagtccttacttcgtagagcttctcacctagaataactacagcaaatcgtactacattagtccgctattatcgccgtatatagataacggggcctctaaataggttataggaatataagcagaactctcctaagaagtataaggggcgacggcgaataatataaaaacaggccatataatggctggcttaatatggcgaagccttttatagctgcctataaagctggcttaaaactaccaatctgtttccttaatgaagaaaagctagtctactagtaccgaacgacccctaagaatatcaattatgatataaccgatacgataatataagggtgctctaacagctagagtggcaactttatctgtggacgacctaatggcgtggataatatggccgacgaggtatttatcgtaacgatactaaagtctcctgctaccgtatatgtgcagtctagctgcgaggctaagacttataacgctaaggccggaatatggtcacactctgtgccgataggtataggtagacagagctttaaggttgtttgtgaaggaaagacagttaactctctgtataggattagtcggagagatattactaacacatatccctatagtatctacaatttcaatgcttatataggcactctaccagcggaagcctctattaaccggctgtagccggctagattagcactattatcgcagggattgcagattgcatatccgactacactaggtaccaggtaaaagaagtaatttaagtattactgtactcttgccagattctagaggatattaattccttaaacagtcagttaaaagacttcgtggctcaaatatctgacaatctgctttatctttaataatacaaaacactatttccctccgataactgcttgcctatcaattacattgccacagaattacggatctcggcagaaaagttattaaatcaagaaaacccactgtatatatagacggttcgtaattaaaattaaatcaataatattcctatactattctatatatcgcctagtttcccttagcgttaactttaaacaaatatagacatcggactaattgagccgctaactgtaaccaattagtaactatcgcaggtgattctataggtatcaacatagtaaatgtcgtcctggaagatatataagatccagtaccatacgtggtatatattacagtgttccctaatttaatatggcccactcgattatagatatacactaggccttagcgataggaccagagaagagttattatagtaagaccgattgcaagaatgtctacctaggcttcgatgtccctaaacgcgttaataattgaatgaccagtcggtctatatagggatcattaactcccttaaagatatataccatctccgcttcttcagatattagaatctgagggtcaatagtaaaggtttttttcttaatacctgattacaaaattgctttaagtcaattttgcaaaaagtacagtgtaatcccggttcctacctaaggaatactaaacaacctactatagagaacagagttgtttatatttatatttacatcatggtcaaacgttcaagtctattccttaaccatatatattcggtaccgcaaggtcatttcagtaagcaattttctctatacttcacagtaacagacttatcgataatctggtatttaaatcattgaaaaggccaaatcaaaaatgccttaataggataatataacgttatatatctcttatgcctacagcctacttaactattttcagtacccacgcgtataactataagctggttccttagtactaagttataggtgtatgctaagtatatcagagtttgataatccatatacattttcggataatactaatatactaagcaatagggctaagagatcttttcgtctattaaagtcgcctctaagtaggaaccgtctactaactcacatagtacgcaatatactaataagaagaaacgcggacaacaatctaccagaaatcaggccgcagattagctttctttattactagctttaccatggtcgccgatcatcattatatcataaaaataactcagaagatccagaagcattccctctagaagggatctacttgtaaaggcgaactaaatatatagtaaacaaggccaggctctaagcttcctatagaatactccctatgatacataaactaccggtagataagatagccaactatatagtaagtttactaataagctccacgaggtcaaccagtcaaccaaccattaagctaacaccgtgctagccataatattactctaattaaaggtaggcggagcaggtccgaatataaatacgcgtaagcgaagcgcactaagggcattaggattagggtggattattttatatactaaataaagctactagaagttaataattcggtcattataataataaggtttctatatacctaggctaatatatttataacctacttcatatggttgcctatctaaacacttccggtttacatatttacttcctcagataataacgattgtggcccctttctgtctgcgcgaaactgtcgtacttattcaatttaattatcctctcctataactgttagtagtagatattagtaatccccaattgtagactagatactatcgggcaaatcttcgtcttcaccccgtgtataaaatatatcaagatcgaaaatcatcagtcagagatttcttcctatatagggttaaacagtcttcgtaacagccttatatatcgacagactcgtacacactatacagcagcttatcagtaccataacagccttccgcttctaacctataataggaaatgagattagaatcggtaacactcacccgccacagccacagctccgcattagttatttataagtcgcgcaacttcctcttcaatattaaccgagccataaaagtaccagagccactcaccctattagtaggaaatattttcttcggggcctgattaggtatgtaggcagtagatactgaattataaaatctagagcttagttagattatatcgcctaggataaattgtgcttacagataacttatacaaaaccctttctaatcgagatagaatagctgttctatctatttatttacctactttagataccctacgtatactatattagtaaaggcgatccctaggctccgaaccataggctaaacgtagggacataccatctatgccaactcggcgcttctagagaacctctaacttctgtaccattacttctcacttataactggcttatactagtatctcaatatacgatagcgctcgaaaaaatccaatatcctccaccacaaagaggattatactgaaccgatagaaattaagagggtatccatagggtccgagtataataaccggctacctactcaggaattctagtacgttatagtataactttcgcgtaagcccaagttaaggctcagctactatatataccgttcgttaaatcggtccgtcttcctaaaacgtaatatagaaaataggaagctgaaaataagtacagaagctagcccgtggtatctagagctacacgtactagccagggcggatcggttggttaaggggtagtgtgatattaatctaaaggaactagctcatagagtttatggtcacctcattttgagaagatttccaaggcttctggttctatatagccaccatacagataacggcgctaatagaaaaccataggcaaatagcgcccactaagtaccaccgatacaatgactatcgctctataaggtggtatataagcgcgcagatcgcggttaccataagaagatagtagcattttattataaactacatataatgccgttagactgccgcacaagtcactagtatcataagaataagagcagatcctacctacattgagttagctatagccacctatataactcataaatacagctctacagatagtaatatataccgctattagaataatataccgtggatttataaggttcgtcgttctagtaatactaacgagcagcgaatagtgcaatagagaatagagcatacatatacgacctacctagcgatagaaccatataagcatataacggtccatatgcagcagatctaccagaaaaccaaaagtcatactggtatataagggaatgaggttaataactaccaaagagccagctcttttctatacttccctctaggaataggtttacaactaaaggccaataatatttaccgcaagcatgacagctaacactagtgcttactagtactaggagatatccagccagcttataccctttagtaggtagacgtaggtaaactgccgccaggagcctaacattttcaattagaaggggcgataaaagcctatatagcatctcccccgcgcccagccccacatacctcgtctaagccaatagatcaactatattaataggacggctgtagcgctgatagtatacaagttagggagagaggtgctagtaaaccattgatataagtctaacccaatcgggggcattctatttagttattgacggaaaaacggtggtaaggcgagtgtattttgtggcagaaaaatcttaataaattctctaactctctaaaactgacaatagtcctaaaacatgacaatctgatggacaacttagtaatcaaaacaaacaaaacaannnnnnnnnnnnnnnnnnnnnnnnnnnnnnnnnnnnnnnnnnnnnnnnnnnnnnnnnnnnnnnnnnnnnnnnnnnnnnnnnnnnnnnnnnnnnnnnnnnnnnnnnnnnnnnnnnnnnnnnnnnnnnnnnnnnnnnnnnnnnnnnnnnnnnnnnnnnnnnnnnnnnnnnnnnnnnnnnnnnnnnnnnnnnnnnnnnnnnnnnnnnnnnnnnnnnnnnnnnnnnnnnnnnnnnnnnnnnnnnnnnnnnnnnnnnnnnnnnnnnnnnnnnnnnnnnnnnnnnnnnnnnnnnnnnnnnnnnnnnnnnnnnnnnnnnnnnnnnnnnnnnnnnnnnnnnnnnnnnnnnnnnnnnnnnnnnnnnnnnnnnnnnnnnnnnnnnnnnnnnnnnnnnnnnnnnnnnnnnnnnnnnnnnnnnnnnnnnnnnnnnnnnnnnnnnnnnnnnnnnnnnnnnnnnnnnnnnnnnnnnnnnnnnnnnnnnnnnnnnnnnnnnnnnnnnnnnnnnnnnnnnnnnnnnnnnnnnnnnnnnnnnnnnnnnnnnnnnnnnnnnnnnnnnnnnnnnnnnnnnnnnnnnnnnnnnnnnnnnnnnnnnnnnnnnnnnnnnnnnnnnnnnnnnnnnnnnnnnnnnnnnnnnnnnnnnnnnnnnnnnnnnnnnnnnnnnnnnnnnnnnnnnnnnnnnnnnnnnnnnnnnnnnnnnnnnnnnnnnnnnnnnnnnnnnnnnnnnnnnnnnnnnnnnnnnnnnnnnnnnnnnnnnnnnnnnnnnnnnnnnnnnnnnnnnnnnnnnnnnnnnnnnnnnnnnnnnnnnnnnnnnnnnnnnnnnnnnnnnnnnnnnnnnnnnnnnnnnnnnnnnnnnnnnnnnnnnnnnnnnnnnnnnnnnnnnnnnnnnnnnnnnnnnnnnnnnnnnnnnnnnnnnnnnnnnnnnnnnnnnnnnnnnnnnnnnnnnnnnnnnnnnnnnnnnnnnnnnnnnnnnnnnnnnnnnnnnnnnnnnnnnnnnnnnnnnnnnnnnnnnnnnnnnnnnnnnnnnnnnnnnnnnnnnnnnnnnnnnnnnnnnnnnnnnnnnnnnnnnnnnnnnnnnnnnnnnnnnnnnnnnnnnnnnnnnnnnnnnnnnnnnnnnnnnnnnnnnnnnnnnnnnnnnnnnnnnnnnnnnnnnnnnnnnnnnnnnnnnnnnnnnnnnnnnnnnnnnnnnnnnnnnnnnnnnnnnnnnnnnnnnnnnnnnnnnnnnnnnnnnnnnnnnnnnnnnnnnnnnnnnnnnnnnnnnnnnnnnnnnnnnnnnnnnnnnnnnnnnnnnnnnnnnnnnnnnnnnnnnnnnnnnnnnnnnnnnnnnnnnnnnnnnnnnnnnnnnnnnnnnnnnnnnnnnnnnnnnnnnnnnnnnnnnnnnnnnnnnnnnnnnnnnnnnnnnnnnnnnnnnnnnnnnnnnnnnnnnnnnnnnnnnnnnnnnnnnnnnnnnnnnnnnnnnnnnnnnnnnnnnnnnnnnnnnnnnnnnnnnnnnnnnnnnnnnnnnnnnnnnnnnnnnnnnnnnnnnnnnnnnnnnnnnnnnnnnnnnnnnnnnnnnnnnnnnnnnnnnnnnnnnnnnnnnnnnnnnnnnnnnnnnnnnnnnnnnnnnnnnnnnnnnnnnnnnnnnnnnnnnnnnnnnnnnnnnnnnnnnnnnnnnnnnnnnnnnnnnnnnnnnnnnnnnnnnnnnnnnnnnnnnnnnnnnnnnnnnnnnnnnnnnnnnnnnnnnnnnnnnnnnnnnnnnnnnnnnnnnnnnnnnnnnnnnnnnnnnnnnnnnnnnnnnnnnnnnnnnnnnnnnnnnnnnnnnnnnnnnnnnnnnnnnnnnnnnnnnnnnnnnnnnnnnnnnnnnnnnnnnnnnnnnnnnnnnnnnnnnnnnnnnnnnnnnnnnnnnnnnnnnnnnnnnnnnnnnnnnnnnnnnnnnnnnnnnnnnnnnnnnnnnnnnnnnnnnnnnnnnnnnnnnnnnnnnnnnnnnnnnnnnnnnnnnnnnnnnnnnnnnnnnnnnnnnnnnnnnnnnnnnnnnnnnnnnnnnnnnnnnnnnnnnnnnnnnnnnnnnnnnnnnnnnnnnnnnnnnnnnnnnnnnnnnnnnnnnnnnnnnnnnnnnnnnnnnnnnnnnnnnnnnnnnnnnnnnnnnnnnnnnnnnnnnnnnnnnnnnnnnnnnnnnnnnnnnnnnnnnnnnnnnnnnnnnnnnnnnnnnnnnnnnnnnnnnnnnnnnnnnnnnnnnnnnnnnnnnnnnnnnnnnnnnnnnnnnnnnnnnnnnnnnnnnnnnnnnnnnnnnnnnnnnnnnnnnnnnnnnnnnnnnnnnnnnnnnnnnnnnnnnnnnnnnnnnnnnnnnnnnnnnnnnnnnnnnnnnnnnnnnnnnnnnnnnnnnnnnnnnnnnnnnnnnnnnnnnnnnnnnnnnnnnnnnnnnnnnnnnnnnnnnnnnnnnnnnnnnnnnnnnnnnnnnnnnnnnnnnnnnnnnnnnnnnnnnnnnnnnnnnnnnnnnnnnnnnnnnnnnnnnnnnnnnnnnnnnnnnnnnnnnnnnnnnnnnnnnnnnnnnnnnnnnnnnnnnnnnnnnnnnnnnnnnnnnnnnnnnnnnnnnnnnnnnnnnnnnnnnnnnnnnnnnnnnnnnnnnnnnnnnnnnnnnnnnnnnnnnnnnnnnnnnnnnnnnnnnnnnnnnnnnnnnnnnnnnnnnnnnnnnnnnnnnnnnnnnnnnnnnnnnnnnnnnnnnnnnnnnnnnnnnnnnnnnnnnnnnnnnnnnnnnnnnnnnnnnnnnnnnnnnnnnnnnnnnnnnnnnnnnnnnnnnnnnnnnnnnnnnnnnnnnnnnnnnnnnnnnnnnnnnnnnnnnnnnnnnnnnnnnnnnnnnnnnnnnnnnnnnnnnnnnnnnnnnnnnnnnnnnnnnnnnnnnnnnnnnnnnnnnnnnnnnnnnnnnnnnnnnnnnnnnnnnnnnnnnnnnnnnnnnnnnnnnnnnnnnnnnnnnnnnnnnnnnnnnnnnnnnnnnnnnnnnnnnnnnnnnnnnnnnnnnnnnnnnnnnnnnnnnnnnnnnnnnnnnnnnnnnnnnnnnnnnnnnnnnnnnnnnnnnnnnnnnnnnnnnnnnnnnnnnnnnnnnnnnnnnnnnnnnnnnnnnnnnnnnnnnnnnnnnnnnnnnnnnnnnnnnnnnnnnnnnnnnnnnnnnnnnnnnnnnnnnnnnnnnnnnnnnnnnnnnnnnnnnnnnnnnnnnnnnnnnnnnnnnnnnnnnnnnnnnnnnnnnnnnnnnnnnnnnnnnnnnnnnnnnnnnnnnnnnnnnnnnnnnnnnnnnnnnnnnnnnnnnnnnnnnnnnnnnnnnnnnnnnnnnnnnnnnnnnnnnnnnnnnnnnnnnnnnnnnnnnnnnnnnnnnnnnnnnnnnnnnnnnnnnnnnnnnnnnnnnnnnnnnnnnnnnnnnnnnnnnnnnnnnnnnnnnnnnnnnnnnnnnnnnnnnnnnnnnnnnnnnnnnnnnnnnnnnnnnnnnnnnnnnnnnnnnnnnnnnnnnnnnnnnnnnnnnnnnnnnnnnnnnnnnnnnnnnnnnnnnnnnnnnnnnnnnnnnnnnnnnnnnnnnnnnnnnnnnnnnnnnnnnnnnnnnnnnnnnnnnnnnnnnnnnnnnnnnnnnnnnnnnnnnnnnnnnnnnnnnnnnnnnnnnnnnnnnnnnnnnnnnnnnnnnnnnnnnnnnnnnnnnnnnnnnnnnnnnnnnnnnnnnnnnnnnnnnnnnnnnnnnnnnnnnnnnnnnnnnnnnnnnnnnnnnnnnnnnnnnnnnnnnnnnnnnnnnnnnnnnnnnnnnnnnnnnnnnnnnnnnnnnnnnnnnnnnnnnnnnnnnnnnnnnnnnnnnnnnnnnnnnnnnnnnnnnnnnnnnnnnnnnnnnnnnnnnnnnnnnnnnnnnnnnnnnnnnnnnnnnnnnnnnnnnnnnnnnnnnnnnnnnnnnnnnnnnnnnnnnnnnnnnnnnnnnnnnnnnnnnnnnnnnnnnnnnnnnnnnnnnnnnnnnnnnnnnnnnnnnnnnnnnnnnnnnnnnnnnnnnnnnnnnnnnnnnnnnnnnnnnnnnnnnnnnnnnnnnnnnnnnnnnnnnnnnnnnnnnnnnnnnnnnnnnnnnnnnnnnnnnnnnnnnnnnnnnnnnnnnnnnnnnnnnnnnnnnnnnnnnnnnnnnnnnnnnnnnnnnnnnnnnnnnnnnnnnnnnnnnnnnnnnnnnnnnnnnnnnnnnnnnnnnnnnnnnnnnnnnnnnnnnnnnnnnnnnnnnnnnnnnnnnnnnnnnnnnnnnnnnnnnnnnnnnnnnnnnnnnnnnnnnnnnnnnnnnnnnnnnnnnnnnnnnnnnnnnnnnnnnnnnnnnnnnnnnnnnnnnnnnnnnnnnnnnnnnnnnnnnnnnnnnnnnnnnnnnnnnnnnnnnnnnnnnnnnnnnnnnnnnnnnnnnnnnnnnnnnnnnnnnnnnnnnnnnnnnnnnnnnnnnnnnnnnnnnnnnnnnnnnnnnnnnnnnnnnnnnnnnnnnnnnnnnnnnnnnnnnnnnnnnnnnnnnnnnnnnnnnnnnnnnnnnnnnnnnnnnnnnnnnnnnnnnnnnnnnnnnnnnnnnnnnnnnnnnnnnnnnnnnnnnnnnnnnnnnnnnnnnnnnnnnnnnnnnnnnnnnnnnnnnnnnnnnnnnnnnnnnnnnnnnnnnnnnnnnnnnnnnnnnnnnnnnnnnnnnnnnnnnnnnnnnnnnnnnnnnnnnnnnnnnnnnnnnnnnnnnnnnnnnnnnnnnnnnnnnnnnnnnnnnnnnnnnnnnnnnnnnnnnnnnnnnnnnnnnnnnnnnnnnnnnnnnnnnnnnnnnnnnnnnnnnnnnnnnnnnnnnnnnnnnnnnnnnnnnnnnnnnnnnnnnnnnnnnnnnnnnnnnnnnnnnnnnnnnnnnnnnnnnnnnnnnnnnnnnnnnnnnnnnnnnnnnnnnnnnnnnnnnnnnnnnnnnnnnnnnnnnnnnnnnnnnnnnnnnnnnnnnnnnnnnnnnnnnnnnnnnnnnnnnnnnnnnnnnnnnnnnnnnnnnnnnnnnnnnnnnnnnnnnnnnnnnnnnnnnnnnnnnnnnnnnnnnnnnnnnnnnnnnnnnnnnnnnnnnnnnnnnnnnnnnnnnnnnnnnnnnnnnnnnnnnnnnnnnnnnnnnnnnnnnnnnnnnnnnnnnnnnnnnnnnnnnnnnnnnnnnnnnnnnnnnnnnnnnnnnnnnnnnnnnnnnnnnnnnnnnnnnnnnnnnnnnnnnnnnnnnnnnnnnnnnnnnnnnnnnnnnnnnnnnnnnnnnnnnnnnnnnnnnnnnnnnnnnnnnnnnnnnnnnnnnnnnnnnnnnnnnnnnnnnnnnnnnnnnnnnnnnnnnnnnnnnnnnnnnnnnnnnnnnnnnnnnnnnnnnnnnnnnnnnnnnnnnnnnnnnnnnnnnnnnnnnnnnnnnnnnnnnnnnnnnnnnnnnnnnnnnnnnnnnnnnnnnnnnnnnnnnnnnnnnnnnnnnnnnnnnnnnnnnnnnnnnnnnnnnnnnnnnnnnnnnnnnnnnnnnnnnnnnnnnnnnnnnnnnnnnnnnnnnnnnnnnnnnnnnnnnnnnnnnnnnnnnnnnnnnnnnnnnnnnnnnnnnnnnnnnnnnnnnnnnnnnnnnnnnnnnnnnnnnnnnnnnnnnnnnnnnnnnnnnnnnnnnnnnnnnnnnnnnnnnnnnnnnnnnnnnnnnnnnnnnnnnnnnnnnnnnnnnnnnnnnnnnnnnnnnnnnnnnnnnnnnnnnnnnnnnnnnnnnnnnnnnnnnnnnnnnnnnnnnnnnnnnnnnnnnnnnnagtcacgtgatccaactgtatcagggatgaaaaatgacagtattcatcctagattctgacaggtttaaatgtaaaggagggttagatggatatagataaattcggtcctccttctaatccttaaagtatagtcactgtagtaagacgagtattttaattatattactcggtccttctgtcctctaataaaagccgtttgcttcgaaggataacttacgttatgatctcgctatgaggatagtatataataaagctagtagttagcgaaaactctttctatagagagaataggcttacctatctcattgttagtctgtctgcgtaatacgctactgtatactctaggctttggggggttagatatcatgtagtaattatctaatggaccttatcgataagtaaagacgtacctgctctatcccttactaggaaaaggcttgcttgcttaatgctgatagtccctgattgagctattaggtctcaatatatatcggctattatagggataattggctcttaaatgttatataagatacctagtggaggcgggcgacgtcttactatctagaactgtgaactctaaaccgcgaactctaaaccgcgaactctaaaccgcgaactctaaaccgtaaaactttaaatcgcggatactcctacccttgcttaactctctaggttagctggcgatctaatcctgtagttagcagcgctatggacgtttagctagcgactctcctacaaaccctacttttaggccatttttggaataagttagcggggttgccttctattccggcttaccctaatctctagggtaaagggtaagaccgcggggctactaatgacgtagtgacaccttaacggtctagactctgtatctagccgataattggtttatataaagatgactagacgtgctgttgtgatgtaactaaccgtaataggctgagcttactatactaataccacgccctatcttacccctagacctatccgagttcgatatattgtgagaagggttaccagagccttatctgtgagggaattaagatcctttctatctagtagcaagaatctatcatccttacgactttgtggcttaacgtagggatgtcagtaggtggtatttaatagattacgagtaaagatataaggtggtcttatcctagggtgggctctgtcagaagaaagtaagcctatttagggcgcttctctaaggtggagcgaggagtagctaggaactaatcatacattggctcctctgatccgttattattcccctacttttgtttttaaacggtacttcatgtgttttttcctagcttactgctaatcgctccttgaagtaattgtatctattttatgatgtccctctactatgccgttatttattatagtacaactactagagaattattagttatagtaaccacattgccgctgtgcttataggaattggaggtacactggccttaggaatggtattagttgttatttatgattttcgactgagctggactaatgttaagctgctgtgtgtagagcgggattaatactccttatccttgaacggccgatttacctagagctccttattcctcctaggatactacagtaagtgataggatctactatataaacgcggtaaggtaggactaattgatttatcttctatttatagataactgaaaggagtttgaccaagtaaaatcaaacgtataaatagcgtaggcctggttaaactctaactctctaagctaaaatcagacttgatatttatctgaataaaacggcgtaatcttcgacctatctatctatgttaatctactatctctgtcgttaaattgtgaattccgattattattcgaatattatcgggggagggacgcgctggtagctgattataggtcaggaaatagctgatagtatgttctaagttactacagagactgataatattaggctgagttatggaaatatagaatatcaaagcctttacctatatctcggtgaattagccattttctctatataatattagctagggaatttcgaactttatagaagtatatatattatccttctatagtcttggctaataagtaacgttatacttagattttatgataccgaccattttttactaacttgcttatatcgaaagatagtatcgcaaatatatgactttctgggaataggaaggtgttagtctctaggatttataatggctgcctcgatacagttaagaacataggtagtgaactttcttggtctaagattgagacgcctattcttttcctcattacagatggtcttatagagtatgctgacttggacttttgtgagtcaaatccttatatagttttctgcatttaggttgcccttctccttgatatgttggcagattccggcgatcctgtgtctcgcagaagagcctggtaagacgccaaagcctacaaaactccataatcgttcagtttgccagtgatttacttgactttccaagtgggccaagtcctgggggaaaagacagtcacctagttccatggctcgttaaagtttgtttagactcaaatccggaaacaatagtatcatgttttgagtatggtatataggtatgactccaggggcctggacatattgtaaggcttcaagcgaaagagaaggattagtatattgattttcctcggtcggattgtcaaccatatatggacttaaagattgcttagcagtttaggagataaagatcgctgactctactagtggtagtcctatgccaataccatccacattttcggacatattatatagggtggagccctctaagccagatgccggtagtagtgtataatcgaatgtacgggtattggtatatctaacaactaggagggatcgagatccgccggagtagagaaatcagagcctaaggtattggttcctatatctagactaggaacagactagggggttggatacaagtatatttccagaggctatggttttagcggattaatctccgagttcaaaggtatgggcgagataccaagattgtgggtgaactcactgaatatttttgttatagtataaacagcccttacctaaatggctttcatattcctatgaactaaataccagattaaacctaaggcttttcaagcccctagtatatatctgctactatactaactaaaaagtaaaaaaaagaaaaggtcattgtaagataagggttctatatagagattatagctattacttaggctctatgatgagtaattgcgctaaattagccccccccccccccccccccccccccccccccccccccccccccccctcccgccnnnnnnnnnnnnnnnnnnnnnnnnnnnnnnnnnnnnnnnnnnnnnnnnnnnnnnnnnnnnnnnnnnnnnnnnnnnnnnnnnnnnnnnnnnnnnnnnnnnnnnnnnnnnnnnnnnnnnnnnnnnnnnnnnnnnnnnnnnnnnnnnnnnnnnnnnnnnnnnnnnnnnnnnnnnnnnnnnnnnnnnnnnnnnnnnnnnnnnnnnnnnnnnnnnnnnnnnnnnnnnnnnnnnnnnnnnnnnnnnnnnnnnnnnnnnnnnnnnnnnnnnnnnnnnnnnnnnnnnnnnnnnnnnnnnnnnnnnnnnnnnnnnnnnnnnnnnnnnnnnnnnnnnnnnnnnnnnnnnnnnnnnnnnnnnnnnnnnnnnnnnnnnnnnnnnnnnnnnnnnnnnnnnnnnnnnnnnnnnnnnnnnnnnnnnnnnnnnnnnnnnnnnnnnnnnnnnnnnnnnnnnnnnnnnnnnnnnnnnnnnnnnnnnnnnnnnnnnnnnnnnnnnnnnnnnnnnnnnnnnnnnnnnnnnnnnnnnnnnnnnnnnnnnnnnnnnnnnnnnnnnnnnnnnnnnnnnnnnnnnnnnnnnnnnnnnnnnnnnnnnnnnnnnnnnnnnnnnnnnnnnnnnnnnnnnnnnnnnnnnnnnnnnnnnnnnnnnnnnnnnnnnnnnnnnnnnnnnnnnnnnnnnnnnnnnnnnnnnnnnnnnnnnnnnnnnnnnnnnnnnnnnnnnnnnnnnnnnnnnnnnnnnnnnnnnnnnnnnnnnnnnnnnnnnnnnnnnnnnnnnnnnnnnnnnnnnnnnnnnnnnnnnnnnnnnnnnnnnnnnnnnnnnnnnnnnnnnnnnnnnnnnnnnnnnnnnnnnnnnnnnnnnnnnnnnnnnnnnnnnnnnnnnnnnnnnnnnnnnnnnnnnnnnnnnnnnnnnnnnnnnnnnnnnnnnnnnnnnnnnnnnnnnnnnnnnnnnnnnnnnnnnnnnnnnnnnnnnnnnnnnnnnnnnnnnnnnnnnnnnnnnnnnnnnnnnnnnnnnnnnnnnnnnnnnnnnnnnnnnnnnnnnnnnnnnnnnnnnnnnnnnnnnnnnnnnnnnnnnnnnnnnnnnnnnnnnnnnnnnnnnnnnnnnnnnnnnnnnnnnnnnnnnnnnnnnnnnnnnnnnnnnnnnnnnnnnnnnnnnnnnnnnnnnnnnnnnnnnnnnnnnnnnnnnnnnnnnnnnnnnnnnnnnnnnnnnnnnnnnnnnnnnnnnnnnnnnnnnnnnnnnnnnnnnnnnnnnnnnnnnnnnnnnnnnnnnnnnnnnnnnnnnnnnnnnnnnnnnnnnnnnnnnnnnnnnnnnnnnnnnnnnnnnnnnnnnnnnnnnnnnnnnnnnnnnnnnnnnnnnnnnnnnnnnnnnnnnnnnnnnnnnnnnnnnnnnnnnnnnnnnnnnnnnnnnnnnnnnnnnnnnnnnnnnnnnnnnnnnnnnnnnnnnnnnnnnnnnnnnnnnnnnnnnnnnnnnnnnnnnnnnnnnnnnnnnnnnnnnnnnnnnnnnnnnnnnnnnnnnnnnnnnnnnnnnnnnnnnnnnnnnnnnnnnnnnnnnnnnnnnnnnnnnnnnnnnnnnnnnnnnnnnnnnnnnnnnnnnnnnnnnnnnnnnnnnnnnnnnnnnnnnnnnnnnnnnnnnnnnnnnnnnnnnnnnnnnnnnnnnnnnnnnnnnnnnnnnnnnnnnnnnnnnnnnnnnnnnnnnnnnnnnnnnnnnagtcacgtgatccaactgtatcagggatgaaaaatgacagtattcatcctagattctgacagatataaacgcgttttctttttaatagtatgaatattattctaaaaaggaaatccgccctaaccttagttttaaacggtgtttatagggactgaactgagtattggaccgcggataactgtatatagttaagggattgctaatcctatataagtagtatacctttcttaatcggccttttctggctatgctctatcattagcagcggtataagcagggctataaagagatattgatttcctgacttagatagtagtatctttactaatataactaataatggagggacctagtaaattacctgaaatggaagacagatatagagaggtactaccaagcgtataagtaagtttggccgagaatacctcggtatctggctatgaagtctcgcagctagtaagatggatatatggctatagaggaccctactgaccaatcacacgcagaatcacgataccatgaggaataatctatctgtggagcccttctaacctatacttaagatattgaaacagcttaaagaagaagatactgagcttatattttaggctatacgcctggtagggtactaccggtatttgtgggagtcttgtgtttctaaatatatagatggcaagtagcttgaagaagcaaatgaaaagctgcgggccggaaatattcagctatataacgaaggaagccacttgaagcttcgctaagataagtaggtagcttacttgtattctattgaaaatgtattagatgaagtttagggaaaccttattagtatacttaaagtttagaacaatcgatcggccagtgacttggctattttactaggagataggtttcctagatattagtctttgctgttgggcttgaatatattaaagccgtttcggagctgtattaccacaatattgcaattctggtatgtaacgatagtaagcctatgataacctactaatgaagcccttgaccctatgtccctagaattcgttgcctaccacgtgggttaaataaactaaatgctcgtctactggacttctagtacttcgtactatataaaacgatatgactatctagaccataaggatgagtagttagagttgtaaaagttagaaagggtagtaaattatgatctttgctaccgagaaggtgaggatttacctctagcgatagcagctaataggatagaataacccctaagattgtaattagaagaaggatagctaccactctaactgtgtaatataaagcgtaacgcagttacgcttgagtcctggtatgggttattgtatacccgtctacctaccataagagagaacctaagcctagataatctaaaaagagaaggaagagtacaatgacttacagtaggcaattaaagtaagtactaactactgtggccgtaatctttgttaggtataagaaaagtgtaaatagcggaaaatagattattaactgatatggtgcactagggaggctttgtaggaaaatgcttatttagagatactgatgtctggtggttaatataaaactgagaaataacgtgatggtatataccatgagtatagagggaaataaactggttatccctaatatcacttctctccctatcttacattttctgctctagctcagtcctatgtatactgctagtagaacgatctttggcgcaaatacggtaaggtcgagtttctagtacaataaggttttctaaactgctcgacgagaccatatgagaaggatacagctagctagtagtaacactgtggctagtagtgtatgtaatatagttggaatctgtatgactatcttatggttgaggtgtaagaataaaggggactttagctgactttatgcctggattgttagctatggtgcttactagatttgctctgtgctatgggttctaatgtcatgaagtcagctatcttgtgttacctaaagaaaatggcctaagtctaataagtctgttatatgctctctattcgtctttctagatgatattgtctctcttaggaaccactaagtccctaggagcctgatataagctcctaggaaccaaataaatgttcctaggagcgctataggcaattccaggagcccctaagcccctaggaacttagaattgggtcctaggagcgaagggctggtaaatgactatatggaatctgttaggcagtgctctgtgctcgagtttagtaataaactatctataatagggcaatctataaagccacaactgtatcctatctactgaactattattactctatattgccataaccagctgtagaaagtatatctcttatcgaattggcggctacctctgttctgttctgaaatagaataaaccactaatataatcatggtatgatagtcgttacttctaagaagctatacttatttattaaggcttacggagactaataatgagatatagactattaagttactcaccactatcctagacttaccgaccgagattctttgggttatagccgataccctaaggggaaacgaaatttctactcttacccgaactagccgaatactctatttaaagctacggttggtcttgatcaaatataatattaagtaccagaacagttctatatttcactgggctgctaaagctaactgtaccaactttataaaaaccttactctcctactgagctaacgttaatgtattggttgatgattgcttccctttgataacagctatgtaatataggtccgggttgacatttaagctcttcctgaagaattaaaagatagaagtcaacctgaggaataaggctagaaagagtgttttgtggtatagtgtagagaaaaattcatctgccgttgtgaaaaggctcctctaataccctgatattgagatagatcttttgtattgctagcgctaaaccgcactctggcttgcagtcttttatgaaagtaaagagcttgtggccatgctgctctctaaaggtgctaaccctgatgcgatagattaggatggtatattgccttggatcgaagcctatattaagaatagggagcctattaaatatttgttcctagattattgtagaacagtgtgccccgagataaagagtgagacgtgtaccggtaatatagaaatgattagggatgatacgaatagtaaggaccctggtacgttatgaatgcggcttagctggggagaagacgttgatatagtggatcactagggaagaacggccttatatcttgcagctgctagtggaaatctatcggctgttaagttacttctcgataaaaaatctatcgattgtgatgtgctggactaaagaaacggcataccgctctatgtagctgcaatgggtggatatctcgcagtggtagatctattactgcgttaaaacgctctcgtaaactgtaaggacgattctagaaataccctgctgtggtatttaacttctagttattatgacgatatcatagagagacttttgactgaaaataatatggatgttaatatagtcggaggaggagggagatatagtgagccttctactttactatactatctggtaaggagaatggatacagttgttctacgatggtttcttataagactaactctcgatctaaatatctgtgtgggctttcgatcacctctctgcctagctataatagagggtaacattgcggttataagattgttccttacttataacgagcttgaaatcaatgctcgacatatatataaagattccctgctctgcctagctaccaaaagaggcaatgttaatatggtgaaattattggtggaataaggtgatcgattgaagattaaccagctgaacaatattgataaggagagtgtactttttgtggctgtctataatcaaagctttaatattctggatatcttgcttcagtatcctgccattaaccttaatttaagtaattgttagggcgaaactgcgttggggttggcagttaaaggaggagatgtgaaaatagttaaaaggctactccaggactcgaaacgtgttttaaacctaaaagttccagctcttagatcctataatagtcatgctatgaagaagcttattgaagataagatagagtggaaaagacaggacagctgttatctaagctaagatcggctgtttataagatatataaggtttgcctatatctaataacttttattaaataagaatagtctctggctgttatttatatcttattctttaaaaattaatcaagatttactccggatcattctagtattttattaggtaaacaggctagcgatatatattaggatatatggacgatcattttattatagcgactgttctgatacggggttatatgaaagataggcagagtattactctaaatgagcctataataaatagactgtaaagggatggagcttattacttaaaaccacgagagaaagctctttctacccttaggaaattaataatatgaaaagtaaggcttagctgcctatatataggtaatcgtctctctctctaagttattgataactgtcagaatctaggatgaatactgtcatttttcatccctgatacagttggatcacgtgactnnnnnnnnnnnnnnnnnnnnnnnnnnnnnnnnnnnnnnnnnnnnnnnnnnnnnnnnnnnnnnnnnnnnnnnnnnnnnnnnnnnnnnnnnnnnnnnnnnnnnnnnnnnnnnnnnnnnnnnnnnnnnnnnnnnnnnnnnnnnnnnnnnnnnnnnnnnnnnnnnnnnnnnnnnnnnnnnnnnnnnnnnnnnnnnnnnnnnnnnnnnnnnnnnnnnnnnnnnnnnnnnnnnnnnnnnnnnnnnnnnnnnnnnnnnnnnnnnnnnnnnnnnnnnnnnnnnnnnnnnnnnnnnnnnnnnnnnnnnnnnnnnnnnnnnnnnnnnnnnnnnnnnnnnnnnnnnnnnnnnnnnnnnnnnnnnnnnnnnnnnnnnnnnnnnnnnnnnnnnnnnnnnnnnnnnnnnnnnnnnnnnnnnnnnnnnnnnnnnnnnnnnnnnnnnnnnnnnnnnnnnnnnnnnnnnnnnnnnnnnnnnnnnnnnnnnnnnnnnnnnnnnnnnnnnnnnnnnnnnnnnnnnnnnnnnnnnnnnnnnnnnnnnnnnnnnnnnnnnnnnnnnnnnnnnnnnnnnnnnnnnnnnnnnnnnnnnnnnnnnnnnnnnnnnnnnnnnnnnnnnnnnnnnnnnnnnnnnnnnnnnnnnnnnnnnnnnnnnnnnnnnnnnnnnnnnnnnnnnnnnnnnnnnnnnnnnnnnnnnnnnnnnnnnnnnnnnnnnnnnnnnnnnnnnnnnnnnnnnnnnnnnnnnnnnnnnnnnnnnnnnnnnnnnnnnnnnnnnnnnnnnnnnnnnnnnnnnnnnnnnnnnnnnnnnnnnnnnnnnnnnnnnnnnnnnnnnnnnnnnnnnnnnnnnnnnnnnnnnnnnnnnnnnnnnnnnnnnnnnnnnnnnnnnnnnnnnnnnnnnnnnnnnnnnnnnnnnnnnnnnnnnnnnnnnnnnnnnnnnnnnnnnnnnnnnnnnnnnnnnnnnnnnnnnnnnnnnnnnnnnnnnnnnnnnnnnnnnnnnnnnnnnnnnnnnnnnnnnnnnnnnnnnnnnnnnnnnnnnnnnnnnnnnnnnnnnnnnnnnnnnnnnnnnnnnnnnnnnnnnnnnnnnnnnnnnnnnnnnnnnnnnnnnnnnnnnnnnnnnnnnnnnnnnnnnnnnnnnnnnnnnnnnnnnnnnnnnnnnnnnnnnnnnnnnnnnnnnnnnnnnnnnnnnnnnnnnnnnnnnnnnnnnnnnnnnnnnnnnnnnnnnnnnnnnnnnnnnnnnnnnnnnnnnnnnnnnnnnnnnnnnnnnnnnnnnnnnnnnnnnnnnnnnnnnnnnnnnnnnnnnnnnnnnnnnnnnnnnnnnnnnnnnnnnnnnnnnnnnnnnnnnnnnnnnnnnnnnnnnnnnnnnnnnnnnnnnnnnnnnnnnnnnnnnnnnnnnnnnnnnnnnnnnnnnnnnnnnnnnnnnnnnnnnnnnnnnnnnnnnnnnnnnnnnnnnnnnnnnnnnnnnnnnnnnnnnnnnnnnnnnnnnnnnnnnnnnnnnnnnnnnnnnnnnnnnnnnnnnnnnnnnnnnnnnnnnnnnnnnnnnnnnnnnnnnnnnnnnnnnnnnnnnnnnnnnnnnnnnnnnnnnnnnnnnnnnnnnnnnnnnnnnnnnnnnnnnnnnnnnnnnnnnnnnnnnnnnnnnnnnnnnnnnnnnnnnnnnnnnnnnnnnnnnnnnnnnnnnnnnnnnnnnnnnnnnnnnnnnnnnnnnnnnnnnnnnnnnnnnnnnnnnnnnnnnnnnnnnnnnnnnnnnnnnnnnnnnnnnnnnnnnnnnnnnnnnnnnnnnnnnnnnnnnnnnnnnnnnnnnnnnnnnnnnnnnnnnnnnnnnnnnnnnnnnnnnnnnnnnnnnnnnnnnnnnnnnnnnnnnnnnnnnnnnnnnnnnnnnnnnnnnnnnnnnnnnnnnnnnnnnnnnnnnnnnnnnnnnnnnnnnnnnnnnnnnnnnnnnnnnnnnnnnnnnnnnnnnnnnnnnnnnnnnnnnnnnnnnnnnnnnnnnnnnnnnnnnnnnnnnnnnnnnnnnnnnnnnnnnnnnnnnnnnnnnnnnnnnnnnnnnnnnnnnnnnnnnnnnnnnnnnnnnnnnnnnnnnnnnnnnnnnnnnnnnnnnnnnnnnnnnnnnnnnnnnnnnnnnnnnnnnnnnnnnnnnnnnnnnnnnnnnnnnnnnnnnnnnnnnnnnnnnnnnnnnnnnnnnnnnnnnnnnnnnnnnnnnnnnnnnnnnnnnnnnnnnnnnnnnnnnnnnnnnnnnnnnnnnnnnnnnnnnnnnnnnnnnnnnnnnnnnnnnnnnnnnnnnnnnnnnnnnnnnnnnnnnnnnnnnnnnnnnnnnnnnnnnnnnnnnnnnnnnnnnnnnnnnnnnnnnnnnnnnnnnnnnnnnnnnnnnnnnnnnnnnnnnnnnnnnnnnnnnnnnnnnnnnnnnnnnnnnnnnnnnnnnnnnnnnnnnnnnnnnnnnnnnnnnnnnnnnnnnnnnnnnnnnnnnnnnnnnnnnnnnnnnnnnnnnnnnnnnnnnnnnnnnnnnnnnnnnnnnnnnnnnnnnnnnnnnnnnnnnnnnnnnnnnnnnnnnnnnnnnnnnnnnnnnnnnnnnnnnnnnnnnnnnnnnnnnnnnnnnnnnnnnnnnnnnnnnnnnnnnnnnnnnnnnnnnnnnnnnnnnnnnnnnnnnnnnnnnnnnnnnnnnnnnnnnnnnnnnnnnnnnnnnnnnnnnnnnnnnnnnnnnnnnnnnnnnnnnnnnnnnnnnnnnnnnnnnnnnnnnnnnnnnnnnnnnnnnnnnnnnnnnnnnnnnnnnnnnnnnnnnnnnnnnnnnnnnnnnnnnnnnnnnnnnnnnnnnnnnnnnnnnnnnnnnnnnnnnnnnnnnnnnnnnnnnnnnnnnnnnnnnnnnnnnnnnnnnnnnnnnnnnnnnnnnnnnnnnnnnnnnnnnnnnnnnnnnnnnnnnnnnnnnnnnnnnnnnnnnnnnnnnnnnnnnnnnnnnnnnnnnnnnnnnnnnnnnnnnnnnnnnnnnnnnnnnnnnnnnnnnnnnnnnnnnnnnnnnnnnnnnnnnnnnnnnnnnnnnnnnnnnnnnnnnnnnnnnnnnnnnnnnnnnnnnnnnnnnnnnnnnnnnnnnnnnnnnnnnnnnnnnnnnnnnnnnnnnnnnnnnnnnnnnnnnnnnnnnnnnnnnnnnnnnnnnnnnnnnnnnnnnnnnnnnnnnnnnnnnnnnnnnnnnnnnnnnnnnnnnnnnnnnnnnnnnnnnnnnnnnnnnnnnnnnnnnnnnnnnnnnnnnnnnnnnnnnnnnnnnnnnnnnnnnnnnnnnnnnnnnnnnnnnnnnnnnnnnnnnnnnnnnnnnnnnnnnnnnnnnnnnnnnnnnnnnnnnnnnnnnnnnnnnnnnnnnnnnnnnnnnnnnnnnnnnnnnnnnnnnnnnnnnnnnnnnnnnnnnnnnnnnnnnnnnnnnnnnnnnnnnnnnnnnnnnnnnnnnnnnnnnnnnnnnnnnnnnnnnnnnnnnnnnnnnnnnnnnnnnnnnnnnnnnnnnnnnnnnnnnnnnnnnnnnnnnnnnnnnnnnnnnnnnnnnnnnnnnnnnnnnnnnnnnnnnnnnnnnnnnnnnnnnnnnnnnnnnnnnnnnnnnnnnnnnnnnnnnnnnnnnnnnnnnnnnnnnnnnnnnnnnnnnnnnnnnnnnnnnnnnnnnnnnnnnnnnnnnnnnnnnnnnnnnnnnnnnnnnnnnnnnnnnnnnnnnnnnnnnnnnnnnnnnnnnnnnnnnnnnnnnnnnnnnnnnnnnnnnnnnnnnnnnnnnnnnnnnnnnnnnnnnnnnnnnnnnnnnnnnnnnnnnnnnnnnnnnnnnnnnnnnnnnnnnnnnnnnnnnnnnnnnnnnnnnnnnnnnnnnnnnnnnnnnnnnnnnnnnnnnnnnnnnnnnnnnnnnnnnnnnnnnnnnnnnnnnnnnnnnnnnnnnnnnnnnnnnnnnnnnnnnnnnnnnnnnnnnnnnnnnnnnnnnnnnnnnnnnnnnnnnnnnnnnnnnnnnnnnnnnnnnnnnnnnnnnnnnnnnnnnnnnnnnnnnnnnnnnnnnnnnnnnnnnnnnnnnnnnnnnnnnnnnnnnnnnnnnnnnnnnnnnnnnnnnnnnnnnnnnnnnnnnnnnnnnnnnnnnnnnnnnnnnnnnnnnnnnnnnnnnnnnnnnnnnnnnnnnnnnnnnnnnnnnnnnnnnnnnnnnnnnnnnnnnnnnnnnnnnnnnnnnnnnnnnnnnnnnnnnnnnnnnnnnnnnnnnnnnnnnnnnnnnnnnnnnnnnnnnnnnnnnnnnnnnnnnnnnnnnnnnnnnnnnnnnnnnnnnnnnnnnnnnnnnnnnnnnnnnnnnnnnnnnnnnnnnnnnnnnnnnnnnnnnnnnnnnnnnnnnnnnnnnnnnnnnnnnnnnnnnnnnnnnnnnnnnnnnnnnnnnnnnnnnnnnnnnnnnnnnnnnnnnnnnnnnnnnnnnnnnnnnnnnnnnnnnnnnnnnnnnnnnnnnnnnnnnnnnnnnnnnnnnnnnnnnnnnnnnnnnnnnnnnnnnnnnnnnnnnnnnnnnnnnnnnnnnnnnnnnnnnnnnnnnnnnnnnnnnnnnnnnnnnnnnnnnnnnnnnnnnnnnnnnnnnnnnnnnnnnnnnnnnnnnnnnnnnnnnnnnnnnnnnnnnnnnnnnnnnnnnnnnnnnnnnnnnnnnnnnnnnnnnnnnnnnnnnnnnnnnnnnnnnnnnnnnnnnnnnnnnnnnnnnnnnnnnnnnnnnnnnnnnnnnnnnnnnnnnnnnnnnnnnnnnnnnnnnnnnnnnnnnnnnnnnnnnnnnnnnnnnnnnnnnnnnnnnnnnnnnnnnnnnnnnnnnnnnnnnnnnnnnnnnnnnnnnnnnnnnnnnnnnnnnnnnnnnnnnnnnnnnnnnnnnnnnnnnnnnnnnnnnnnnnnnnnnnnnnnnnnnnnnnnnnnnnnnnnnnnnnnnnnnnnnnnnnnnnnnnnnnnnnnnnnnnnnnnnnnnnnnnnnnnnnnnnnnnnnnnnnnnnnnnnnnnnnnnnnnnnnnnnnnnnnnnnnnnnnnnnnnnnnnnnnnnnnnnnnnnnnnnnnnnnnnnnnnnnnnnnnnnnnnnnnnnnnnnnnnnnnnnnnnnnnnnnnnnnnnnnnnnnnnnnnnnnnnnnnnnnnnnnnnnnnnnnnnnnnnnnnnnnnnnnnnnnnnnnnnnnnnnnnnnnnnnnnnnnnnnnnnnnnnnnnnnnnnnnnnnnnnnnnnnnnnnnnnnnnnnnnnnnnnnnnnnnnnnnnnnnnnnnnnnnnnnnnnnnnnnnnnnnnnnnnnnnnnnnnnnnnnnnnnnnnnnnnnnnnnnnnnnnnnnnnnnnnnnnnnnnnnnnnnnnnnnnnnnnnnnnnnnnnnnnnnnnnnnnnnnnnnnnnnnnnnnnnnnnnnnnnnnnnnnnnnnnnnnnnnnnnnnnnnnnnnnnnnnnnnnnnnnnnnnnnnnnnnnnnnnnnnnnnnnnnnnnnnnnnnnnnnnnnnnnnnnnnnnnnnnnnnnnnnnnnnnnnnnnnnnnnnnnnnnnnnnnnnnnnnnnnnnnnnnnnnnnnnnnnnnnnnnnnnnnnnnnnnnnnnnnnnnnnnnnnnnnnnnnnnnnnnnnnnnnnnnnnnnnnnnnnnnnnnnnnnnnnnnnnnnnnnnnnnnnnnnnnnnnnnnnnnnnnnnnnnnnnnnnnnnnnnnnnnnnnnnnnnnnnnnnnnnnnnnnnnnnnnnnnnnnnnnnnnnnnnnnnnnnnnnnnnnnnnnnnnnnnnnnnnnnnnnnnnnnnnnnnnnnnnnnnnnnnnnnnnnnnnnnnnnnnnnnnnnnnnnnnnnnnnnnnnnnnnnnnnnnnnnnnnnnnnnnnnnnnnnnnnnnnnnnnnnnnnnnnnnnnnnnnnnnnnnnnnnnnnnnnnnnnnnnnnnnnnnnnnnnnnnnnnnnnnnnnnnnnnnnnnnnnnnnnnnnnnnnnnnnnnnnnnnnnnnnnnnnnnnnnnnnnnnnnnnnnnnnnttgttttgtttgttttgattactaagttgtccatcagattgtcatgttttaggactattgtcagttttagagagttagagaatttattaagatttttctgccacaaaatacactcgccttaccaccgtttttccgtcagatcctccccctctcccccctataaagagatattaaaaagaggggttatataggtataagttatcctataagacattaggagatatcagatttacaaagtacaaggtagtcttacttatatccctcttatcaaagaggatacctacctaatgtatccaaaattatctttcccttctctagataatcacatctacctatctatccgtacaaccttctgcgttagaaatacttttactactttaaggatcataagagctacaaattctacagctatctcctttcacaataacttaccgcggaaattggcgatctcagggcaatacgagcaaccgaggaggacccaatagcttcagaaagcgcaatcagtcggaaacattctatatatactttcgacgtggtatatgctactacggtgagaggtacagattctcgcatgatataaataaggcttccgactttagatcaaacccggctatataccatcccataacctataatctagacgcttagaatcaatactttgactagaagaggttcctgagaaacgggatatcaagatctatgtattctctgatgaaacaagaggagctcctttaattctagaacagggctctcgaaattctggaaagcgacagtagagagaatcatcagttcctcgccaaagatcttatgaataatgagcttcatagatatgattttatcctggtaactacggaggcgcataattctaagggaattattccagcttataataagctgttccttaaagtcattacctatcattctctcttagactgtctttctatcgagtcatatattagcactctgtatatatccttcggtagcacaaatagagattgagcgatcagatatctgagtaatatctaccagagccttataggcagaggtgaagaaaccagcgaatttaccttagttatttcactagacacggtgaaattactgttaaataccctttaccagctcttatcaagggtctaacgcgcttaatttcacaatgaactccccgtactacttaacctagcccacaaactggcctctaaaataacagaagaatgctcgaaagctgacctcaatggacttcagagcagaatagaagtcatacagagcctagtaactagcataagccgcaaccttattacacccagggtatatgagggagatccccagaggactaggccagtcctatcgtcttttccaatagatatacaaatacctggcgggagatataataacgacctcacagatatatccgaaattctaattcttcctactcttagagagattattaatatcaatccagaatatctaccctctaccaatttcctacaaccgcactttctcgccgaccctttacaaagatatattgatttaacgttccgactgctataccacaatatctttagctctacaaaagatattcttagggatctgtaacagtagactgatttaatataaagtccttatctatcaggtaaggatagcgcggcacatctctacctagggacacaagttcagcacatatttatcaataataggaataagcttaaagcaactatatccttttctattctaccatagctccgcaaaaggacctctaaagagtaatccaaatagtaggaagactctagtcgacttaataaaggaagccttatctactttttaatatcccaaggaactcatagaaagcttatcttcctcgaagtaactgtaaagaatacttccaaaaaccaagtgtactagaataagaacagtcttatatctaacagacattcacctagtattacagttaaacttacggcttatttataatataaactaatattcctaggccagctttatagtgagagacttactagcattctagttaaattctatggcttaatccctaccacattcgtccctatcctagaaaacctacaataaatccaatgcgaaggggatttagcattccgaaagtaggtcttactagactataagagtaataaagatcgacacaatatccccctaccggcatatatacgtaaaccagggtttatctttcccctaacttcaatcgcaacccctaccgctaacaacgttacattagatccgagtacccctaagtccgttaataccttaaagctataaactcagactggtctagattatagctagtatcagggacttatcgcagctctcacacaagagtataccctaatccaaggcctactaagcaccggaaagtcctatttaggcgttaaggttatccaagctctacttaaaattaagaaaaatacaaaccttaaaccaatcattatgatataagtagtgagttcataccttccagtattcttacttacaggaaccataggtattataccaaccataccttagaccaattcttaaagcaccttcttaatataggcatctagaaagtgatatacattagtggccgcagtcaggcccctaagcttaaaggtaagaaccttcgcgttatcagtaaagactttaggaagacaaaggtagaatcgcagaccctcagcaagtcctatagggaactcgaagcccatatggaagatactggatatataatgaaacctctacaccagtcttaaaagggcctatcttaggccgctatagggaacttcgtgcacagaaaatagcctactatatataagcagcttaaccgactggatctagaagggttcataactgtcacagataacaaattgctttattagcttagggttaaatcgataagaatccagaaaggtcagaacgaggataaagttgatattatatgcttagaacgcttaacacatactacctaggaagatatttatactcttataaacccagaacgccagattcttacaatggagtggttcaaatagtagcgggaaagcgaaattacctagatttttaaggccattaatcataccgcgagccttcgtaataacatcaatgcagtctataataaggtcaatcgctaagccctaattcaagtagatgtaatcggaatcataacaacatcccttatacgccacatcaagacattataccgcttaggattaaaggtcattatatacaaggaagcagcagaagtaatagaaacccatatcatctcagcccttatgccaggtattgagcactttattcagattagagatcatcgacagctgcaaccccagattcaaaattattcactcagtcttaaatcatccacaggaatagtatagcagctagacagaagccagtttaagagacatactctcggcgagctaggtcttaagcctacccctttttcacagcttaatatatagcaaagaataagacccgaaatctcgcaacttatcagaagggtctatcccaaacttaaggaccataaaagcaccacagctttacctaatattattagaataagggacaacctcttctagctagaccattaatacaaggaagacttaagagataacagtagctgtattaagtcttatagcaaccaataggaggtcgatatagctactactcttattcggcatcttgttcggtaaggagagtataagagcacagatattgccctcttaaccctatataccgggtagttacagaatctcaggacattgcttagcaaggatttcgagatttaccttagtaagcgagacctagaaaccttagctacagataggtttaagaaggtagaagataaggatctagagtcaaataattgtaaggcacttgagaaaaagatattacttcagacactccgccttgccacagtcaacaatttctaaggcaaggaggcaaaagtaatagtggtctccctagttcgcagcaataaaaagtgtaaggttggctttctgtgtaccgagaaccgcattaacgtgctccttagccgggcttaatatagcatatacctcattggaaatgctgaaatatatcttaatatagaaatgtgggccgatgtctactctcagctctcctgtgcgaatgcagttaatatagagttagctctatactatcctcgccatctagatatacctattctatgctctggtccttatgactttgaaaggaagagtccaaagggtaggtgtagtctcctgtataaccgacgacttgagctatatggccattaatgctaggctaagtgccattcgacggttatatacgacggctttatgtatagaaagccttacctatgtatccgatcaacctgtcactataaataccctaagctttgtggtgaatattgtggcctttgcttaacgaagattcaagatgttaagcttccttgtggttatattaagaaggtcctctattactattagatgttgaacctggagctcattaagtgcgatattgaggttgaaaagactgttcctaagtgtggccataaaattaaggttagctattttaaggatatcacgtccccgatcttctgttgccctgagccatgcaccgatattctcagctgtggccacaactgcagtaattgctgtggaaactgtctccaggaagttgttaatagaagaagaataaccaagtatctgaagtatataaaaatatgtgaccgtctatatggtgtttataaccataggtgtcctaaggaataccacgatagggaaagctgcggttcctataaggcaaagtacaaagtaagactcgcaatcacccattatctcattattatacagaaacactaaccataccataggtccgatgctcgcattcagcatacgactcaacttataaaaaggcatatataccatacatcgagaaatatacctagtcctacgcctatcaaggctcctactcaataccttatacagcaccatacaatcgacttccctgcgataagcgatatactaaaaatcttaaatacagccactagtatctaagcctctatagggaaggttatccaaacaatctgtatcaaaagtgcggtaacaagagtgatactcgtattaacttcatcgaaataaaagactattctaaaatcaacctcgataaaactccgattatcatacttaaatacagttatttctttataagtaagtcggttgatagattagttggcctagatcaagtatacataagggataaagatagaaagttcgaagacctctataatctctcttcttctcttaccacagccataccctcatgccctaactgtaaacagcctattcgccaatttatgacgaaacattacaattgtgttatcaatcgtgctattatagacaagacttacaagcggttccttgccaaaggtcgcatagacctcataaaccttaaatcgcgtctaaataatattaaacacaagctcaactccaagggggcgtttctactccctaggaacgctgctacaaagcttaaagcacttgatatagaggccttaaaacttagcaaaaccatataggccgagaatcaaccgataaaacggcttatagatacgattactaccagccagaaactagaacagaacgaaattgcctccctattagccagaatagaggcaacgaatctagcaatccaggaacctaatagtcaaattactcttggcataaggctaattcagataaaatcccaagaaattgcaattagccatttgtttaaagttatatagttaagaaaagatcctctagaagtacagccaggtattaccaaagtatcactaatgttaacttaggtattagaaaattaccgagacttaataactcaggcatataaacgaagtctctaccgcatcgttatcatagcaaccatctcatttgcgaaaatcgcccagctagacgcgtaatatcgccgcacttatccagtaaaagcaatatcggatctaaatcccaaagaagctagcgccaattctagaaagctcgaaaatcgcactaaaaccatccgcgatctccttaccactatattaaaactatacaatggactagggaactaccctaagctctaagaacaggtccaggaaataacctatctctacgaagggccgcgatataagacagtaactttagaagaattagaatcaattaagacagccatagtcagtaggcaaagaggaatagcgactcactctgggcactagtataattgcgttaacggatatctagtaagtaaatttccctagtcttaatctatctactatcctaagttaccttaataggacaacttagctaacaatattttctagtttactattagagagtgtagtataccaatagagcaagctagatacccagagtatagagcacctattagaggtcaaaaccacacggccgttacaggtgtatctcaagcgcgggaaatagagtagatagaaaccatattatatttcaattatagtaggaaaatatatgttttcttttctttccctgatactatatacgaatctaaactcaaatgtttttagatagtttatcaagcgtctataccttatcctagctattagggatatatataaagtatacaggatatttagagaaatgatctgcaggacccacatagcatatataggttcccctaaacgcgaggaagcctattccttttacttcctcgcgctatatcttatatctagagtcgactatagctttctttaatattaactacttatctaaatacactatccttatctatagatacgtgagaccctcacaaatagatactacattactgggaatagatgctatattactagggatagatactacgtttctggaagtagactaggatctatgaaaccatatgccaatcgatcgatcaattaattcatagtctatcccagccttttagaaaacattctcagccacactcagataacagcaagactatcgttttataggtctagctctataaccatatatataaataattatatatatagaactaaacaaggataggaattatagaagataagaatttgtaaagccttaggtagcaaggcttctagaagaccaggacagtagttttaaatgagcttattctaaaccgcgaacttaaaagtatcctttaaccctaagtagaccctcagccatacgatagtagggaacttatggttctccaggaggctgattggatataggtatttagcggtttgaaactacgaccccttaagcctttctgccgttaaggctcgttatttattattgtctcgtatatatatactaaataaagcaggtaagttattaaatccagaaagacagcttctcaataatataaaaagggaaatattaaatagcctattgatattatgaacctagacatgctcactactctttagcgtcaggcgctgtcgttatctccaaaacctatcgtattatgggtctattcttttacgtctataaatactactatagataggaaggctaagattactataaggggttttctaatataacgagcatatattaaacagaacttatctccagttaaagaagttagaaaatagagcactatcacagaaaataatatccagatccaaggttgatttttcttaagcatagataaaatagagtactttaatttaacagaatacctataagcctcccaattaatcggtatataactcaacacggtacatataagttgaagttttctactatatttagattagatagatggttattaaataaaacattataacaacccggtttattcaggtcactaaatcaatttctgaattctactaattaaaagctcgacctcttagggcattgtttctctctactagccccttctatatcctttccctcattttaccaataggcattatcggtaaggtttaggccgcagacgttatatctactcctatcgaacttcctcctaggtaacggctctcttatattacagctttttttctaggcccttattaaggggaccaaacactgtaagagatttccaccatatctctggtcttaagcatctctactaaagccgcagtcgaagcatagtttttgatcgctttaagggaggttcagggctattagcagccttattctttagcgacggttatatattaaaataatagtcaagtaaaggcatggtatcagatatatcttataagcggtacattgactaacgagagatattacttattatccaaaataatataggaggggatataatactttaactaggggaaatcaggctatatatcggtctcccttatcattactattactagaaagtactccgtcttatagaacctagataataggtctctcgtcccttatttagtcgaatagaataagaaattagtggtcggtggtaggtccatacttaggcagccgataaagttaattgtactgcctctagacttatctctctccccctatacctaactgcttaaacttaaggtcctattaaagattttcaacgtttttaatcttcggttaccggcttagccccactaggatgtttatacttaaacgataatataatttccgtcaaacgttcagtccttaacgccttaaataagatatttaatatataggctgaatatatagagggcttacggccttacttaacagaccaaaagcaatcatagtccttagtagtaataagaagcgtacgttcttcagataacagtgccgtaaggcattagcagcctatatatataggtaactatattccctcagtctaataagacgaattaacgcgcctcagttaaccgacttaaccttatcgtcgctcccagctaagtccatctatagctattaggcagggatagatacgcttagtcaataacggaatctaaaaagagcctattacagttgaacttaggtagtagaagtatgggcctataccggtctatttataaagaaataggccagttacttaaggtagttactccgtagacgctataggctacccaatcagaacgggaccacctacctagagaagaggtaagcatttttatccattaagccgccccgagggcctatataacgctgaagatagacacaaaacgcgaccggcatatagcaaaaaggaaagcagatcatttatagcaaaaatccgcgaattagaatacgctaaccacaatataagcggcgagcttgaccgcacacacatccatctagaggagtccctcggtaaaaaccgcgaaatataagccaaagtccatcggctttaggatgagctagagtacaattcatcccaagcaagtcacttagaaaataagctagttcatatcataggggggattactaaagctatacaggtattataggtttattaggcgcaggagaggagtatatcagattcgtatagagacagataagataaatctggtaatagcatagacagcacagtactaggaacgctagctccgatatacgatagcttatcttaacctctttcatattacagttactgtataggcgggcgttatacatatacgtataagagctatttgctaataaatgtcatattataggcgaacgatagcgaacacgttattagggcttttcacatctagactatttagtaggccttgcgattacagaaaaaagctgcgaaggagagtcaaagcttcggcgtattttcgtgtttccatatcgcgtatttacgttatcttattgtaagctaaggctccagctaataggacttttaagtgggtcaaagttgaacccctataataggaaatatcattttacttcaatggtactgcgtttatagtaatacgaataatacgtttttagctataaatttactaatatttatttcgaataactttaaagggagagtataggcataaagggcttatctgtactatagatagccgtaatataaggttcataggtaaaacattcaagcgtactatatatatatatatatataatatatccttagcttcacatatcactgattctatggcatatattacagtgctaacccaatttgtacacaagacactaccggtatttccatctagctaccacccacaccaatactagaaattagcccaaacagtaaaggctttctttatatactagcgcttaaaggtcaaggtaagtaatattagtcattttacctaagccaatatccgatcaccttccttacctatcaatatattcgggaagctaataccttacctaatataacgcacttatatgcgcttaaatgactcgaggttataataagcagtcttattagccacgtttactagtatcttcagttcgcccttatcccctaattactcgaagagtttgctctgattggttagtatatagtggggttaactaggcggttaaggcttacgcgtaaaagctcttccggtaaacagcagcttttcaactccttaggcagacctttagcttcagtactctataggtagtatagaggattctttataatcagcctttttacaacctcagccaaagcgaatagctttagaattactgcgtctatctcggctatatcgatttggcagctatactctactcccgctataacatagaccaccgttagtaaactatactcatgtggcctaccagctatactcagtttccctacttaccgatcctaaccctactggactctataagtaacatggtatcggtacttaaggcagcgagggctctcccacaaccgcgtaggtattaaattcctttaaggacctatcaggtataagtaccactttctcatatcgggcgctaagactagtacttaccagccgaataattacagcaacctcacccttagtaatagtatacctcgatactaggatctgacttactaagagctctactgactcctagactaaaaatacctaatcctcccaatagtagcaccctaatagacctagaaagctgggataagagaattgactcctggtttctaacagtggcttaatagacgaaaactgctgctttagaaggtggatattaaccagagccactttattgtttctataccaggccaagaagatagactatccttaggaaatcactacgatcgcctcatatgtcagccataggttttagaaaaccggctgaagattctaagcttggtcttgatccttcagctacactagttcaggataagccagagtagaagtagttaccgctaggtcgggctagggcctagaagacggtacagatagataggttggtttttttaaagtagcctaatcgggtattccgtcacaccatacagtaggaggtctagatagctaacgctaaatggaatctatcttagaaatatgtcgagtacaaggggatagctttaatttagcagtaccaggaaccctaagtagagggaaatgttacagagtggttgaggcatccaccctatttaatattaatagagctatagagataactaccaccctatagaactagattaatactaacctattaaagccgagtataggctattatatagatatctaacgacatcagtaatcaagcgttaaaagttactattatacaaacggtcgtcacagtagaaaccggccctatcccacaaaaatgtataggttcaatgtttatatatcctagaattggaataagataaggtactgtttgtctttacttagaaacgatagtatatatcaccctaggtaaatcccataatatcgaataaaatagtctcatatattcatcagccacctcttacttatctgaaatctactcctacagccggaagtaatcgggaacctatctctgtcgagcagatcgacgaataatagataagcttaaggggatagagaccaggaaacgatctgaataccgggtaagccgaagcgattaaagctacgagggtactgttagaataaccgacccccctactatatatatgacttcgagaggcatttctatagttgactcgctagtaacatctctagccaccgaagaggaaaggagagcgctaaaagatccgtggcatcgactgtatccataattagtaaatagaccataggaataaagggtgataagttatatactgtatcaggtaagaggtattattcctaggcaaccgataggcaagccagccgtctatataccctaaatgaaccacccccttacgtacattgcattacagtataataggatcatcgctatcttccttaaagcagatcggacatacctcgccatctgaataagacccttagtcgaagctataaatctagatacagtataacccaccgtacttattgttaatagataggatggctagatcgttcggtaaaacatcctagggcacccgatccattgcaagtatatctgacgtaacttcacaactaggagactgagatacctctaaccatataggggcaggaagtcccaggaaggtgatctcgttaatatcctatatcggaggagagagtgtatatggcttagaagaaattccagctgattcctcttctatattatcaacctcttcagctatagatagtgagaaaagatggcgcggagatatctacgcgtggacttggttacacacagctgcgttaaaccaccgctttttaacatcgttctattaacgttcttaatactatctcttacagaggaaaaagaagataataccatccagctgagagtcaagcgtagaaagatcgaataggctccgtacaaggttgttcagcttataccgaccttctttcagggtctctttcttcacagtgagcttacaagcatttcctttctaggtaatgccacagcaggacttatcctccctaaggggccccatctaacagacagccaaggggtcccaaagctactaagagtctaacatcttaagcgcagaatatatataggggagaaggattcaagcaaatctaaaatacaatgattatagtagtagaaagtcaaaccattgtaaagatctagttaagtatatatagtaaacattttctcttaaccgcaattataatacgtattagctatatagaacgcaacgacaattcccgactcccagggcagatagttatattcccgggagcactcggtctcctaggggctaaacaagagttcctaacagccatctagcgtaccctaggagctaccattatctataacattcaccaatagccgtaaaggctctatacctcttttagaaaggtacttagaccatctaaactagtcacatataaggctccactgtgccctcgaagcactttataaaagcaaaattcttatataactaaagatatacacctttcagccacttactctactttaaaaatttcactttaagttaaatcgcggtcatcattatatctacagcagatactcttttcatcgctacaaacatagactagagctctaactatatacaatcaatattcggtcgaattatcggcgatcccacttaccgtttagaatatatataggtcgaagagaatggaatttattactgaaataccgtatcgaaagagtcaaggagaaatagagcaatatacctcaagacatttcaagagcttcttatcggcaattcacctacattaagactctcaaaggcagcaagttatatactatatacagaatacagatattattcctctagggccaggaagtatacccaactatagatacatttacttcacacttaagccaaccaagttaagagaaccacaccaattcagcaacataactacaaccacaatccattagcacatcactggccaactggtatatcctacggcattagcagaaccgaataccttctatcagcgcctctatcttatcatataacccataataagtttttataggcggtaaaatagaggcagaaatctctcaataaaggatatacacaacgtactcttcgtacatccagaaataccagagatcgttacatcgaggtcttagttaattatttacaaacaaataggccttatccaaaccgttcggcctaataacagccatcaccacttaaccatagtcaaaacaatatcctcttccttactacctcctatattacccttttgaccagatttccccctacacggtaacgaccaagcttattagctagcctattaatagcgctagccccactacattccccagaatagcactcgcctatatctatttagcatgaatatatattcaatcttactagagtgtataccaaactcagagttacctatacgtaggtgtaattcctagggtctatcactaggcagtaactctagtaatagagctatagaccgccgaacgtagtcctattcaaatgcagcctcaagggtatcagaagcaggcttgattcatagactagttttagcaggccttagagaatcttcccccagaataagctaaagctcttgcgtcagcttctaggtaagacgaaaatccatatcatcttaaattaaaatggctctatggcttttttaaaaaagtactatgaaataaggaagtaacggtatatatccaaacaaggatatatatatatagaaacgaacccgattaaaatactaccaatactattaatagcagaaggtcaaagcagatcctacgtacatataaccgttagtaacataaggcttactgtttatagcctcagtcaagttagcaaacggatatcaacatataggaaataggaactatacacattcataccatcgtttagcattaagttagctgctctgttctacaacctttataccatcaatttccgagtcaccgacatctctatcgctagtatctaactcctatatttccaactgctttaacaacacatcaaaaattacatatattaactccggctcatgaccaggttccttagcaccgcgctccttcaaaagataaattatcatacctcccatcttctgagtaagtttatagaagatatccgccaacctagatatatggtccctatcctcaattacatgttttaaggtagcctgcatatcacctagtgcttattcgagcttagtctaggctctttctacccagacggcccgagtgtccaacctagcaaggatacgaagatactcctattctcaggttagataggcttctaaggaatcctataaacctaccaagggatccatattataggaatagtaaggaccaagtcgtcaacagtaggcagcttaaaccaagaagcagctcaacagttctatatcaaaaaaggaagttttactagcattaatagctttatatccatagctatcttctaactaaagccgtctcggacccctaatagacttccctttctgcaagcttttaacgggccatattagcttatttctggccatatacagttgcacgagtatagaaactgccttcaagcctaaccatctgtaatgtaaccggccaaactttaaatccagaaacctaccagatctacacattaacaataacagactaggacaagccacgcaatttttattaatacccgttagttcttatggcgcactaccctagaagggcctcccgaggatatttatcacaaattggaacttcggcgtcaaagcttgtaaggacagactctctacctagagagcaaaatacagccctaattctaagaaaagggtgaagagagaaaacagaaggagaaaatccaagggcgccacctgggaaaagtcgaccgagccggtatcatataggacagaatctaggcataccagctagtccaggccaaatcgcgtaccgtaccctggtatacgcctcctaatcacagattaatagaaattataccacaggattaaatttaccggtagtccacaatatactttcgatttctggttaagtggcggcactattaaatcgcgatcgactctaaaggtagagtaccctataagcctccatatatcagaggcaatattattcggcctccctaaatggtctctaaaatgattttaaggtttaacgtcttaagcatggaccagcacgcggtctatatactctgtattgctctaaatacttacgtcatatatcatactatagaccttctctagcaattagccgcgacaagtgtaagccagagtatggttaccgtttctaggccaaatagatctataaggtcgcgattaatcctatttagaagacaaaattaccactattcttctaattattagtaggactctatcccccacgctaactgaatggtctataaaacgccggacaggtcaaggcacataacggatagcgagagccggatataaggcgaaaattacacgggccaggcaacacttagattgttagaataagtatagggttagtattctagtgatctatttattaaggatatttgtaagggctgcctaccggtatatagagtgctctatctcatataacgctcagtctaaccgcaggatcactagtaacggaacatcacaaccgttaaggagcctagcggttaactgatagtaaacagaaagcagggagtaaaaccggagaagaaaatagtcaatagccggctaccggaatataaccatatctatgatactacagggataaccgtttattacaggcctatcgtctctagtcaggccggtaaatagattttctccctaacctagtaacctcaaaatattgcggtccacataaatcggtagtaaatctactcatttcgccgtagtctagatactatccagtaccaccagagacctttaaagctcgcgttacccacctaaaccggtaagtctagagcaaaaaaccgtttcttcttataaaagcctctaatatcgtaactactttcagaggcttaacgttcaacatgccttcctatagatcggcaccccaagcccccgctagagctagctagagcattcctgagtcaaatattatccccaaacgcgctcggcagactactatcactagacctaatactacccctctgtcaggcactcaaggcacacacctacagccaccgctagtatatcctgccattaccgtcctgtgaatacaagtatactcagagctaaagcggaatctagtctccctcgccgatagctaagacccagaaacaaaaacattagaagattattcatcgactatacttataggtttttaaagacactaatagggagcgggacaagtcaatactttctatctagcgactagaggccgataacgcctaagccgcagcgaagatccaccagctaagcatcgaaaaagatcagtctctagtcacagtctaggtatttaagatataaatatagaatttaaaacagcaactagagaccgcgcagctcagtagtatagcgagtgatgacttattgccttagctgatacagacgagcgccgatttcatgattacatagaccaaactttctagcagagtagaagcagagaaaaacaaacgcctagccgcaaccctgcctacttctaatatatttcaaaggaactagtaagcctagaataggcaccttagaatacttgataccaactcgcttctaagttatttactactaagtacccttccgttaaccaattaataaacactggcctaagctaaccaacaagcaaactaataagccaaccaatatatatcgcccttctaaagataggcgtagtatagagaggaagataggtcgctttacagagaaagccatactatcatagtgatcttacgggcttattcatctagctaacatacaatagatatatacgtagctttaggctagtatataatataatttatacggctttataggtacctatcttataaatagaggacttagggaatatcgttataagatctacagttagatagatcatatcgtagaatttaagtgccgcgaataaactatagctaccggaagaaccctaatatcggcgtaatacccttagggcaaaggggaagcaatataggtatatattcaatttctattctcttatagctctgacccttctacacagagctcagtaatcacttcgattagccttttatagatatcttggcgtggtcttagcgtggctaggcctggcattttcaggggtaatttcgaaagagggctagccgtgatttacagatccggttcgcagatatatttttatctcctatccacagtcgggcgacgccttaattgccttccttactcgtcctttccttttatacgttttttcccccgctataatagagaaataatactaacggccctattatctagagattaacttatataacctacatttccttatagtgatacctatgggtgacctacttacagacataaggatacaatagtactaggggaacgaataacatctacgagatttggttggattaacgcataatatatcacgtattcctccgtaatacggtgactggtaattcgggccagatttagtctagtactcggctgtacgccaaaatatccgatcagaaccgggccgcggcacgacccatatcggcacggatcgcaagctttctttcctcgcatacatatatggcgtatagtctataagtcacaatccccttgatctaccgctatcacgttgacctcacgttatttatctagcctttaggcgttaccagcagccgcgaaccaggagttattgtactagctattgcgctaattattttggtatccagtcctactagtccttgacaagtcccgcagcaccaaggcaattttggtgctgcgatatggtgctgcgaggtgctgcggagctaagccaattttggtgctgttgtatggtgctgcagcaccgtcgcagcaccagttttagtgctgcgctagcataattctgccaagaattacccaaaatggatggataaaatgctgacttattttgatagattactgttttttactcatgtattggcattgggaggcagttatgctcactcactactgagattcgtatcaactcacgttcaaaaaataaattaaaagcttcaagtactatacaaatgtagatttaaagtaaaatcagcccaaaacagtatagaattagtggttgatattatatggaagagaatgtgctggtattgtgtgtggatatatatatttactctatgtatataccttctagtttgtaccttgtagtttcgattttatttttctacagtaaaagcctatatttcaccatttttttaaatagtatagtgctgcgaccggatgaattaccctatatcttattttgatctttataattaatatattgtataggctttgtataataacttgatgtactgtctattttccgaccgaggtcagaaaagtggactttaggcagctatgtagaataaggggataatgtagaccccgaaatacattatatcatagcactatatcgtggtgctgcgggagtgctgcgggagtgctgcagcactacggtggggctattataggagtcggaggtacatagccaatagatatcgagatttatattcggctttatgatctatctaccactatactaacatagtagacgctctccctgtttattgttagttgtgtcggtcgcagattttgtctaggtaggccatttgtgctttctgttttcccctttacctcacaccatatacctatacataccatttgcccttaaccttcaatatgtcacattttggacagtacgctgaggctggcccttcttcgcaggtatcttcatcgcaaattggatatccagaccgccttaccgactgcgactttctttcatacgatttaacacatgatccccttactcctgaccagtcaatcagccaacaaacaccaaatcccgaagccccctcaatccttagcattccagagttccaggctccacatactatcactgctccaacaaccctcgaacgaattggccctggagctaagaagctttgggtgtgctatacgaagatgaacaaaacacaatttattgagtggtggcgacacactacacacgcccaaccaaatacttcacgacgtaaagtgaactttgaagcgaattatacatcaccacattgggagcacttcgaccaggttgcacactatcagactggacagccgatggcactttgtcgacgatgtggaaaggcgattcctcatccatcacagtctggaggtcttcactcgttaaaaaagcaccatgagagcaagacctgtcagcagggtggaaggagttcttctcttcagcagacattaaggcaatcgctacagtttgcggtaatatatactatcatatctcaaaacgaactatatactaattcaatatatcttagtctgagtgtccttcggagcagaagaccacttttaatactgaggattgggaacgaattcaaatcaatttaatcacaatgtgtcagctccccttccagttcctcgaaaggccggaaatatttaaatttgttcgatttgctcgcctctcaaaagatatacctccaatcttgactcctaagacagcacggcgtcgcctacaaatgatggtcaagggggatcatcaaaaggccctttctcttttaccaaagaatgctaagctttcaatagcacctgactgctggacttcaccttttcaacaagcgttcatggcaattactggctattttgtggattctggctggaattatcatgagatactactaggctttgagccagtatatggtcagcatactggtagtcacctgagtgagatactacaggatgtactacagcagcatgatattattgatagagtgcttgcggtgactaccgataacgcctctaacaataaaacacttatggagagccttcaccagtcgatcgaacagctcaatctcccagatagcacacgagttgtacgaattccatgccttgcccatgtgatttagctcagcttaaaggacctccttggattgatgaaagccaacccaaacaatgataccgccgatactatctggtcggaggaagagaacaagtcggctcttcaaaaggccaaatctgagaaaggaatcatctatacacttgcaaaggtcagttattcaatatctttattaaagcatacttacaccatctctagatccgtgcttttgcagtctatgtcaacgccagtccccaacgacgggagttctttctaacactacaagacagtgagccgaagctcgtaccaatacaagatgtacgtacccgctggaattcaacatacctaatgcttcagcgcgcaaatcgtctgtccgctacatttaataggtactgtactctatataaccagcttcggttccagctaagtgcacaagagtggcggcaggttgaatacctgctttgtatcacaaaacctttttacatatggacagtcggactatccaaggttaaggatgtcactattcattgcgtgttcgaggtatataacagactgtttggacattttgaagactcccagaagcgcctacatcggaagaaggttccttggaaaaaggcgatgctttgtgctttgaaggctggagaacagaagcttgcaacttactacaaggatactgagaaggctcatgggcatctttatgcaatggggacgatccttacccctgtgcataagcttgactacttcaagggagcagactgggctggcgatgatgcggactggtacacagtatacgaaagctctctacattcctaccttaagcgatactatcagcgccagcctacaactcaatcagtagataaaggcaaggctccacaacgaactgggagtatgtctagtctacttgcacagacccgaccgagatcagctatccaagagaaggttggctggcgagaagagttaacaggttatctcaatcttcgtatgtataccatagaacttgaaaccatgatatatactaacttcgcaaggaactgatgatgatgacccatgtcaattctggaggcaacatgagacccagttcccaacccttgcggcgctagcccgggatgtcttctctgttcctgctactggcgcaggagttgaacggttattcagctcagcgcgggatgtctgccattacagacgtggatctctcaatgcaacgaccattcaagatctaatgatgctccgctgtatgacgcgttttgatgcgaaccacactcaaggccagctatctacagaaagccaggacccaagtgagaggatggaggccgatgaggaggcagaggcccaactatctgattatgatatggctggtatcagcgataatgaggaacttgagtctgaaactgaatatgtatctgaagccgataacatggacgcccatgatcgtgatgcttcacctggtctccaggacccaggcctacctctggatcaggagactctggatcaagagactctagatcaagagatagactcagttgaacttccaaatcatcacccaatagttagaattgtacaaagcgatagccagcgtccacatagggaacggaagcgtcggagagatgatgatgaatatgtatatactaagaggaccaaataaagcgcaaataatcaaacaaatatgataatgatcttttccagatttcctgtttactgtaaataaaataccccaaaattactggcttttctacataacttatgcatgtcacgaggttagtcgtgtttgcactgtttacagtgctgcgggacttgtcaaggcctaatccctagcgacagctcggcagctattcatatcgacagtggcgccggtcgtagactacgcgtctaacgtctagatgtacgcgtataaagataaggctattgggccgatcaaccgcgtctaaaggataggagcataggcgattctaggaacattcctcacagttacgaccaatatagcagaggcggaggcccaccttgccactgttcaacaccgtttctggagacgagctgtgaagatgtggacggacatacataccctgctagaaaccaaccctctccgccggaacacagcacgcatcaagaaattcagaagataccatcgttcgccgctgtatcaagtagcagacgcgctaagaacattgagatggaaatactggaaaccatcaatccgttcacattggcaccataggaagtacgcgtgcaggctgacgttataccaaccccgcagtcaccgaccgcaccaggcgggctaatgcagatcgcaaccagcagttcggcacggaatgggctggtcggatttggggtggcgatcgagaggcagctatctcggtatcgaaaactaaaactgaagaccctttccgtcacattgggtgcaagagcagagcaaaatccgttctctgcggagctagcagcgatggcacatgcattgaacatggtagttgnnnnnnnnnnnnnnnnnnnnnnnnnnnnnnnnnnnnnnnnnnnnnnnnnnnnnnnnnnnnnnnnnnnnnnnnnnnnnnnnnnnnnnnnnnnnnnnnnnnnnnnnnnnnnnnnnnnnnnnnnnnnnnnnnnnnnnnnnnnnnnnnnnnnnnnnnnnnnnnnnnnnnnnnnnnnnnnnnnnnnnnnnnnnnnnnnnnnnnnnnnnnnnnnnnnnnnnnnnnnnnnnnnnnnnnnnnnnnnnnnnnnnnnnnnnnnnnnnnnnnnnnnnnnnnnnnnnnnnnnnnnnnnnnnnnnnnnnnnnnnnnnnnnnnnnnnnnnnnnnnnnnnnnnnnnnnnnnnnnnnnnnnnnnnnnnnnnnnnnnnnnnnnnnnnnnnnnnnnnnnnnnnnnnnnnnnnnnnnnnnnnnnnnnnnnnnnnnnnnnnnnnnnnnnnnnnnnnnnnnnnnnnnnnnnnnnnnnnnnnnnnnnnnnnnnnnnnnnnnnnnnnnnnnnnnnnnnnnnnnnnnnnnnnnnnnnnnnnnnnnnnnnnnnnnnnnnnnnnnnnnnnnnnnnnnnnnnnnnnnnnnnnnnnnnnnnnnnnnnnnnnnnnnnnnnnnnnnnnnnnnnnnnnnnnnnnnnnnnnnnnnnnnnnnnnnnnnnnnnnnnnnnnnnnnnnnnnnnnnnnnnnnnnnnnnnnnnnnnnnnnnnnnnnnnnnnnnnnnnacactcaccgggaaatatatccttcttcctaggaggaaagtcgccttccgatgatcagaagtggacgccgaacttagaggcggtacggacctcaatacgattcgccatcgccacgggccgactcgaggccacctaaccatgccgacgaacataaatcaccccactctcgccgatctaacccaccaatcacctcgtgttacggatggtagacgcgcttcaactgccgaaaataggatgttgaacacttggagaagcgccttcaagcctgtctactaacgaaattactaatccacgaggatccgctgcgatacgaacatctgagatgacatattttgcaagactttttgtatgggctctgaggagacacagtgctatatatattatgacatgtatagtagatcagagatagttgccctttcggttcagccgccgggcgttaataaattgtgtgtgtgtgtaccaatttcgctgtactcattccgttttaccggaatctctggaaatatcgaactcttttggagggtaggttaccacctttttctcgccgagtgcagcgtgaaatggacatccaggaacgactttcttgtgtcgttgaataaaccaaggcgcaaattcagcatctattttgcggtaagacgcaatttcctgcgctttctctgctcccgacagcttttcctgttgttgccagtaggattctgtggggtctggcaatacggtctccacaaacaacatgaaggttcccaagagaaaagtgatgaaccaatccaggattgggttcacaggttcgatctggcacgccttcaaagttgtgggcagtgacagacaaattgcaatccttcgacccagccagcgtaagccaggcgggaaaaagcggaaggcaaactggtcaaagcaaccttcggccacaagatttgcacgctcaggtgcgatccccatgtttgattcgacttcctcgttgtacctcataaggtcatcccagtcagtggggaagctgtggataggcttgccctcaacgtggaacaatttggacatctcttgccaaaaaagatgagatgcctttttctgtttgtcgctaaagccaggaaaacctagctttagctttagacggtgcatagttgccgccgtgtaggtcaaggtatacacgtagtcctcgttgtgaccgaagtctcccggaaattgcttgctgtagtagacatggagatcattgatgtggttgactgatttctttgtaagagggtgatgaggtccatgccaccaccagattgcattgttgttggcagtctgctcgactctctgggtagccttgtagacaatttttcctccatctgaccgccagactgcacgagacccctgctcggtggcaatgaagttcgggaatgtgattgcgtagacaagattgagcataaattgattcaacccatagccggcagacagacgccaaatctcttcgtagtctttctcggggtctagtgattcgattctctgctggatccaataatatgggaggcgtgcagttgatgaggaatccatagttgattgatttgtcatgtgggatattgtgtgaggcacacacatggaaagatgatggtcagtagcaaaactgtagcgtaactgtagcggtcatgcgcgtatttatttaatcgcggagcgattaaatgacgctcggaatgccgcacggcattacgtcaatcagttcgccctcaggtcggctgatggagcgttgtactccggctcagcctgcgacaacaactggtctccttgagaggctgagtggtgctacattaagttgaagagtgggccgatgtaatggcccacggggagccgccggaaacgggggacggagccgagaggattcaattcatccgatgcagattctggttattctggttggctagcggccttcttgcattttactcattttactgccaccgtggaccaagtacaccggaatgccgcggagttagatccacgcacaaaattggatcatcgaaaggccctggagataccatagcaggcagtggccggggaaaagccggagaaaagctgggtatgtaacggataagtcggctggattggttcggcttttgctaggttccgctgactaaagttatattggggagccacgtcccgaggcccaggactgcacagctacgtgaacatcgcaaccagtgatttgccggttagatattcctctagatccgcaaaaatggttaaacagggggatttcagcggaatcgactgcagtatatttgcttaaccctcctttgctttctcatttcctcatcagtcttggtatactggtaactggtgtttcaagaaaaacccacatagtcggtgataatgcaacttttaacttcaattttagactattgaaatccatggcatagaaaataggattacagcatgatatacaatacttacacagctatgcagacgcaattccctacatcacgtcctattatctgttgaaagtagatgttataaagtcttcgggaaatgctagagcaaacacacgcaacaattgccacaccaaagcataacataacttagctgcttttgagtatatgagattgagcgatgcgatttcctttcataaggtctgacaaaagctttcgggaccacaaggtcaatttagcattactgtattaaatgcatgagattacttttcaagagcctttccttttccttcgaataaatattggcatgcattgttatccgtggggaactcgggaatcaggcccattaccggtgtcggcgcaataacgccggtataccggacgatttattaatcctccatgttttgtaatttatgctatgtataggcttctccaaaacccaacttgggtccgacttctataacccaacccaacccaagacccaatactgggtaccctagtcccatctcttggcactcctatgggaccaaatggtgggagttggcaaggtctataaccgcctactaccctataacaccactattctacacccgcctagcacttttagtcatcctccggtcctaatattaacgctcgacttatatagttattcccttcgtttccactagcgactaaaacgacgccgaaaatagctcccctttagctaaatctaagtccccccccccttttcgctatcagtttataaagatatactatataaccttacacatagatatcactggttatggtgtgaagcaagaactctattagataatagaccaataataattaactatataagaaccacaacttatatacatacgaatctatagttcggctctattactaggaatggtttaacctcccggtaactagaactcgtttcaatacgattcaataattgaaacaaacgaacctccacgtttgcgccgcagttgatgctgtttcttcacatatctatatatcactagtttgccacctgactgctgtctcatcagaagttaaaagttaaatagtatcctgtcatcccatgaaatattgtgacatcctgttcctctgcgccccactgagaaatgttaggctatttgcaatacaacagcaattgtcttttgcactcgggtatctagggaacttccatggttcgctggcccaagatgatttgaacccgaaattgattgcgaatgcacattttccttgccatttgacattgttgttaccttagggaaatggatgataaggtctgaatcgtaggggagtaagcgttgctaaaattgacatcctatgaaattgagtagagaaatacatgtatcatcaatctagtttcaaagcaacaatcaacggatggtgttcggtcttatgaccaaaatctgtgtcaaatcgtgtaaacatagatcaccttcctcgccatttccatctgccctaagctctgccctaacccccaacctacagatcctcgccctcaacccaattgccatgcagtccctgcctcaaccgaagcggcagcaggatgacagcctttgccttggtgaactccctggtatccagcaagtgcaactcgctgcacatagaaatatagttattcaccagagccataacatacccaccgccctcaacggtagatccgcgccgcggaatgaaaattggttcttgcaccatatgtgtctttccagggaagtagatctctgtcactccagtttcaatatccaggtgcgctagagcgttatacagcgggtgtccaccacccagctgaggcatgatggtcgggaaatcggttccgagggcagggttcattaagtcaaagaagcagtgcttgtacggttgggcggcgaagcggtcatcaatgcggtagaactccgagttgtcgctttggagaaccgttgagttcaccaagtcgagctgctcggagttggggttgatagtgaaccgggttagctgggagtggatggaactcggctcaggagagtttccttgcgcatccggccaccaaaagaagacgttcttctcgctcagtccgaggtcgagtacgacattgccggattcgtcttcgtaggcgttggctacatggcccgggaaagagttttggtagcggaaccactgggagaggtgacaaatgatgagatgatggaaggagaaagatagggtgcggggaacataccttgagactggatggctttgctcctcgtcgtggaaggactccaatatagaatggagtttcggggctccactgccagtgctcgccgccctgcttcattctctcaatgtcacagacctgagggatgacggggaaaaggacctaaataacaagggggaacaatatcagaagaggattcgctaaaaatacaagaatcactactcacccagttctccgtgacagcaaaatcgtgaatcatagccacaacaggcgcagtaaaccacacggtttccaagaactttccgtcggctgcaatgcggtaataacagacatcgggtgttccatcgcccttggcttcatatccgaagcagaccatctcccccgtgcgcgggtcgaatttcgggtgtgcggtgaatgtcaaactgggcaactgtccatcgaagtcgtacaggccggttgtctcgagggtgtgaggattcaacgcatatggtggagcgtcttccttcagagccaacaatttgccgttaaagtgaacgacgtttgtgttggctgtggtgcggatctcgaattgcacggcatcggtgaatttgttacggtatttacctacagaaagaaacgagttattagttatatgtgagcttgtcaacggtgagggttagtaccaagcaatgctctttgggcctctcgttcccggacgaacttctctgttcggacaaaacgctgcttgaaggagaccgagccgtctttgattttgaaggcgctgatactgccatcgccattgaaccactgttgtcatgtcagctatcctgctattttgggattgaagattcgtatcaattcgctcactggatcattctcgatgaagggcgagaattggggatcgggcatcacccggtagaatgtcccatcaatgtcttccgggatctcgccatacacctccagattcagaacttctccttccactcggcatggcttcatgaacccggaaaattgcgggcggtttgggaagactttccggggcttttgagaaagaacggacattttggttatctcgaaggcaaggaaagaagatcgtgtgtagtagaaaaatcgtcaagtgtagacaatctcatacaagaatttactttttatttaattatcacagaactatgaagtacaaccttgtgtcatctacacttttgtttcctccccgacggaatagcggggatgctgcttgtatacccccggtatccccggtgggtcattttccacttacacatcccaaggttggaaatataggtgatcatttcaatgtaaaattcatttcgatcgtgccgggtagcttagccccgggtgttccggggcttactgtatattgggagaacacagggtatgaggaattttgagccacctgccaacgctgtattgcatataatctaccaatactccgtatactttcccaatctacgatccacgccgtagatctttcatcttatcaatgaccgtgttcttgctcgtcgaactttcatttctgctcaccgaataaaaccgtggaagctacccataataagctaggatacaagactgctatttatagtatgcaggaacaggctcatcgtcattaaatcccccttccgtacatccaggaagtctgtgtcaattatctgtacacgctagtaatttaacgttttcttttaacaatataataaattactttgtgaaggcctaatgttcatatttggtttattgggttaaaaaactgcgatagacttatatactaatatataaagcctattcttgagcctcaaaaaatatattgaaatgtacatccaggtttcaaccgtaactgtattacagtgcgtaattgacaatttaggcaaatagtttttttttacaagatggggcagtactcaggaatatccccacagcatgtcatacacgcatcaatttgtaggtgcgcgctgtgaagaagcaacggcaaatgaaaaagggggctgttcccccgcttccaggcgaaattccccattgcaaccgaactgtgattggtcagaagtggaccccagatctttcacaagggcaactcccgacatattccgaggtttccttactccgtaattcttctcataattatcccatggcagaccagcgtcctcagtcttcgaccccgggtgattccgacatccgaccgacaaaaacgcagggccggaaacgcaagagagtatctgtggcatgtcggtcctgtcgggtccgcaagtctcgtgtatgttatacgatcgccatatattctagagttgatggctgaatttttcaatatagtgtgatggtgcacgaccgtgttcgacatgcgaagttatggacacggagtgccgatatgagcagccgtacagccagcctgtagcaataactaacggcagcagtgagcggtgagtcaatctgttcaggatgtctacacgatccaaactcatccgtgtaggcaagaggagagtctgctcgagcagcgattacaggcaatagaaaaaaggttgcggctatctgggccagacaaggaattcgatagccctgaaatgcatacagccacctctcccacaattcaggagaaccatgaatcccgacgtagtccgggaatgaaagggccgctggatcaagacgatggagtggatggtatgggcgccgtggcactcaaagatggggctgacgaagaagaatattttggtacagttcaatttatcactgcaaattgttttatgggaccctgtctaacgatttgaaaggcgcttcatctaatgtggccttcttgcgcttcattcatgccgttagccatccggtcaaccccgccgacaatttacctctctcaagcatagatgtttccaccgaagttggccaatcaaacgataaccgcttcgatgcattcctaagaagaccatcgggtatcagcagtctaactgagtctcagggaagagttcgcgtagatcccttcgcgcttccccctcaagtggaagcagacgccttgttgcatttatttttcaccaccgtcaatctgatgattccctgcatctatgaaagctcgttccgagacacttacaggaagttgcagattgacgggattcggagtgttcggagatcctggctggggactctgaatgtcgtgttcgccctcgcgacaaatgtcatgacggcgacttcaccgaatattgaaagggccacgagggccagtatttattttgagcgggcgatggaattggtgaaatcagatattttagggcgtctttcattggaaatgggtatggcacacatttaatggcttgcgttcaactcacactgacgtgcttagtgcaattattccttttgatggaggggtaccttgaaggaactacatcttcatcgcttgcctggacgttacatggcctggctgtgaaaggggcataccaacttggtcttcatattatggactcgaagagcatgtcgcaaaccgatcgggaagtgcgcaggagatcatggtattggtgtgttatgaatgatcggcatgtgtctgtaattccgtatatggcgaagtatactaatgacgatcaggttcctgagcgtgacttacggtcggccccctttgattcccttgacccatgtgagattcgaggccagcccctatataacattcagcaatgtgcccagtggtgttaccgtatccagcctggcttattttgatgctatgatgtaagcaaatttccctcgaaaatttctgcagttttgactaattttgataggtctattgctcacatcatgggcgacgccctggagcgtctctatgaccaaaatctccgggcttcccccccccccnnnnnnnnnnnnnnnnnnnnnnnnnnnnnnnnnnnnnnnnnnnnnnnnnnnnnnnnnnnnnnnnnnnnnnnnnnnnnnnnnnnnnnnnnnnnnnnnnnnnnnnnnnnnnnnnnnnnnnnnnnnnnnnnnnnnnnnnnnnnnnnnnnnntctggggcttcgccctcgtctccccatgagtgaaagcctcaaccagatctccaaactgcgctgggaactagcccagtggcaggataatctcccatcctgtttacaaataatagcctcccaggacacgctggatgatgtccctttgacggtcggaaccacgagactccgcgtcctactttctctccgcttcctcggtgcgagaatacttattctacgcccagtcctcagtcaatttctcgattttccgggtatgacattttcgaacgaacatcagtcggaatggctgcggaattcaagtgcagttttgctagcggatttagtccgcacgtgtggcgatatcctacaaatcagcaaaagtatcttagccggttccaggaatgatcagaatctgcttggggcttggtggttttcttgttattatagtatgcataccctagttcttatgatgtgtttgattagtactaaccacgcgcagctttcaactcctccctcgcggtcttgggaatccttctgataaaaagaatcccggcatactccgggcaattatctacattttccgtaactgaattgcgaagtctgctagagacagctatggaggtcctacgtgggctgaacaagggcagtgaaaccgtcatgcgctgtcgagatactttgatgaggcttatcactgcgtttgattttgatggtaacaatgcctatccatttcttggtaccacatatgactgacaaatcaacgtgccgcaaatgtagccggatttacaccagaatcattctcactatccccatccagcgcgtgggcgtggcaatttgttaacccgggcttgttcagctcggaggcatcgttgagtcttgctccagggacggttgatattgcgtctggctctcagtttccaatatcgacgaatattggagtgcgcccagagcatgacatcttccatctccctggatgagttccaccgtatccacctccagtcgaggaatgactggcggaatcggtccatgttgttagttagagggaaagaggtatctacctgatcggccgaacagttatcgagctggatcgctccgtgttttgggtcagagggcatggaggtatcgaatggcggaatcggcccatgttacggctgagacagcacagtgttttcgaccattccccacaaataatgtggttttcatcagactttatagctgcgtggtatctggtatgatagggcctttttcgcccagttgaagtcccaagggaggtttaccgctgaactcggacctcgtaatgactttcgcggtcgcggtaaggccattgcgaaaccagtcttgccaaagttaaagatatatccctccgcgataccgtatttgccgatgatattacggacgagattaaacgactacctcaggatcatcgcaggctgctcgctggtaatcgtaccctcgcccaacatctatcctcacttagccactattcccctgctcctacttctttgaaaggggaaggatactaacaaaacaacctgccgccaccatttgacgtgaacgtgtgattatgcgtacctaagcaagtttacattgtacaattatcttacttggcatagctatctttagtcaatcaatggctaggcttgacttagcgctttgcctttcccctgggcgttaaacaactcgccctgactggccatagtaccagaggttgtgcgtattctccacttgcggctcgtgtgtgcaggtgattggtttgttgaaccatttgctgatcacttaattatgtagcacgctacctgtttgcagtcctgacaagaacaactttactagatcttcactctgaatatcttagttcacaggaaaatcgaactcgccccaacgaggtgaccatattcccgaatacacgtagctaaacatggatgcacggaatatatatgcattgacttgcgtacattgaacccatagggttgagaacatgttgcaagccagccctgctcttacacacataaagtagcatcacttctcttgcgccttctattatgaggctcatggaacttctgctcgtacttctgtagaacgtccattcgcatgtactgtacgatcggaatttgtggaaagctattcacgcatctatggaacaccttcattccaaatgcccgactttccgggagaaagcaccccattgggatccagcacatccttcaagcgtcctgtaaacttattgaacgcaaagccgttgaagtccaacttggccgcaatctggtccatgtagcgcacatgcgtgcggtactccatatatccctgctccgcaccatcatgcagcaagttcctgcacaactcgaggacgcgtgcctcctctctggacgtgtagatgaccagctcgatgccgactacgtagcgcgggtagacatggaagtcggcgaagaagtcgaacttcgcgtcaatggtgcgttgcttcgctgtcatgtaccactcgtacaactcacgtccggatggagggatgatgggcgagaagtcgacgtgtgcaccgcccttctcggctcggctgtcgacgatgcccagtggggtgagcgttgggatgccactgtgcggaatctcttcttctttgatctctgctgcggtgatggcgcggcctggggatccgggaaactcgcgccattcgatcttcacacctgggatcgtggagaacgcgcgttgcacggtttgaattaacgctgggagcatttcgactgagccatatagcgagaagtaggttttccagaatccccagttatgttccgcacggatttcctcgagtacgctgtaaggtacgtatgagttgggctccatgtacggggccagtttggcgtgaacctcggggactttggatgtaagcgcgatgcggaagatgttggcgatggaaggtgagttgaggatgatggagcgccgcatcaggtctgacaaagtcccggtgagagggatgaggtctgcttccttgggaacgctgacttcaagagtggcgtatgcctcgggggcgggagtgatatgcatgccaatcttggtgacgacacctgtttttgttagtgattgagttgttgaggagatgggagaacgttaagtcttaccgaggttggattggtagaacagaccgtcaagggttgggccaaagcctctgttggatggtaagtcaatatgttattggggtgagagcataggcgagccaatgaactgtgaacataccccttgtatagcgcgaacgttttattatccttcatcgctcccatacccgtccgaagcaattcaccattaggcagcacaacttccatgccgcactgtgactgcgaatgctctccattgggcgtatatccaaagcctcggtccatggtatttcccaaaacagaaccccatccaatggccggcaccgatggccagaggttcaggccctgtcgttggatttcctcgtaaaggtcgaagaaggatacacccggctcgactatcgcgtatccgtactcttcgtttacctcgacgatcgtgttcattcggtgcagatctaggataacgcatcctttgacgacagagctggatccaccatatctatgaccgttagtgatatgcagatggcataggagcgatatacatcatggacgacataccccaggttctttccccgtgacactgtccacaaacacaccttgtgcttatttgcaagcttcacgacctcctggacctcttccacagtactgggtcgagcggcaccgcttggtgtgtggtttcctgaggctgaaaatggatcgccgtaagacttctggccttgagtaccctcgagtgcgccatgactaggggtgcgggaaatgttgtcttctccgagcacacgggcgacgtcgtcaaagaaattgcccaatgcctgggggttgacagttggagatctatggggtgccattgtgtcgctgtctgcaagtggaggactacgatatgtctacagggatctacggaaatacttattatatgcacatccctttatttctggggtcatgatcaacaacagctcctactaatttaccagcagccggggataccgggggaagctcacccgcggtcaatcccccaacaaaccggccgctggtatggacccatgctcgccccgctttgatgtcgaaagtttacccctctcggcgtggtcagatttttcagtattatccaccgacagtctctcaattggttctttcggcagtagtgcgtagggatatcctgtaatttgaaacaaagctggagtattgattgaagaactatttgggagactgctgttgagaggttctatatgcctgaggctagtattggcatgtgacagctcgaggattcccaattgacccgtttaccagatggggtagacgctgaaccagccctgtccttggtatttcaccatctctaagactgacagtttccacatcagaggttacgttggacttttctgactcagtgggaaacgggacctcgggattgagaatcccccgagtttttagggaaaaggccgggaagcaatccctgggtatccgcgtatccgcggccttcgtccgcggatagctggctgaacagccgcttacacatactacggaggattttgtttgtattttgcttcgttctatgagttgataattagacctgagttaatagttagaccccttgttccggtaattactagcgccttgtagagtgactatattagatcggatatccatcaatatacatagaacttgtgtcactatttcttccgtgttttctatgattccccaatcttaccatgtttgtcattgcatacaacatcctctttctcttgattgcgtggattctggggcaatgcatctacaatatctttctccatcctctgcgccacatcccaggcccgcttctcgctaaggtgtctcgctgttggctctttagcttagagattagagggactcagcacttgaaaattcatagcctgcatcgcaaatacggtatgttaaatttgtgtctaccaaatgaatatcgccaacttacttcagaggatcaggaccaataatgaggatatcgccgaatgaagtctcatttgacgacatcgaagcgtcggacatcatttacgcacaaacttccaagttcgaaaagtctgaatattactatcgtgcttttgaggaccaaggccccaatctcttcagcatccgtgatcgtcaacatcattcccaggccaagagactcgtgtcccacgcgttctcccgtgcaaatgtcattcagcacgagtcgtctatatatgataaggccctctacttaatggataggattgagcagcgagcaaaggaacgtcgaacgatccctctgttccccgcattccgttgcatgacgcttgatacaatctctgaattttgctttgggaagtccacgggcgcgctgcatatgaacaacttcgagtcaacgacctttgaggccattgacaaggcaaatggggcggtcctttttgtgagttctgccttcccgtcacgaagcctcaagggcagggtgagggatagaattttgagactgacatttttcagttccaatatttcccattcctccggcatctcatccagtgggcaaacaactacaaaatatgtgccgtccctaatggatttattgagttggcgcagaaagcggaggctggcttgcaagacgtgcattcttctggctcatggaccatgttcaaaaatatgatttccatggcggagaagaagtctacccaactgacgaaggaacagttggtgtctgagggtatgctcatgattgttgcaggcacagataccacagccacatccttgtctgtgacccttcacaatttgctgcaacagcctgagacatataagaaattgcaagatgagatccgcacagccatgcccactatggattccagaccgacaatacaggttctcgatacactgcctttccttgatgcgtgcgtcaaggaagggttgcggctcgcttgtcctagtcacactcgccttccacgcactgtcccatcagatggctggtatttcaagaaacattacttcccatatggagtaagctctaattcaactatttacgtccactggaagccactgaccttctgtagaccaatgtgagcacatctcccctgtattatctgcacagcgacaatgtgtttcactcccccaagaaatacaacccgtttcgatggttggtcgatgacgaaaagaggcgacatctgctggcaaactttcatccattctcacggggaactcgacaatgcattggacaaaagtaagtcttccatcgcataccatctcaaatcttcacattgctgaacaaataatctatagtctgtcaagcattgaacagaaaatcgtcctatcgctatttattagacgtttcaaccccggaacagtcttaaagaagaaagtcagcctgatagaggcggtgaccgcagttcctgacgatcctttggaagttcttgtgaatcttatctttgagtgatcgtacctcttctctcgcatatattgatgtttctactgctggtggcctgtatgtacttggaatgagaacttaggctttgaaggccgaagatatttgatggaagtgatctcaaacaggcaaaagtcgtaaaatggaatatacatgctttggagcgaagaagtccctacgtagtgcatatcgccctaaattccatagtcgctatctctccataaccgctaagaaccagagccccactctgctaattggaagtatgtacccggcttctcggaagccgcggaagggcctgaagtggaaacttagactatttaccttttggtcaagatatcccggggaagcctcgggatccccatactgctaagcggaagtcctgctcgagggaataaattacactgtggaggctagggatgattcggtgtcccagtcatctacaactgacacctcgggcatacgttacctgtcggagtcaggggtttaacaacctcttccgatgcgacatattctcagctagattgacaaagtggtgaattgttaacttctcccatgcttcctgtgcatctacgaactctccccatgtatcctcattattacgcatatcgcggagccagggccgtagctttaatatatcggcctttaacaacgagaggttctcaattaggtttaaatcaggtgaatagggaggccaatctattacatttagattcatctcacgtagaaggccctgaataatatacgcggtgtgcgtaggtgcgttatcatactgaaaaataactgggcacggaagcgtcggcttgatatatggtatgtacatgatagacataatgcgaaattatgaaggaatcccccacagatttctgcttccccgcacgcattgtacttggctctatgtggggaattgagctccagtcgggttattgcgaatcattccgacgtattcccgggttcgagtatataagaatatcgagtagctcacatacgttgatccaatttacgaatgctttttatctaagatgtcaacagtggttgaaattctgggaaatatctcctctgcggattggctatctgcatctctcgcatgtgtgagacttaagacatgattatttcttatcctttataatgcttacttttcatctctcacagattttgctacatatcatctataatgtgtggtttggcccattagcacatattccaggcccttttctcgcgaaagtgtcctcattatggattgttttccaatgtcgttacacaagacgatccgaaactcttctcaaacagcaccaaaagtatgggaattttgtccgggtagcaccgaatcatatttctatatccgatccgtccgccttagaagcaatctacgggcacaaatctgggttcaacaaaggccccttttatgaagataagtccagtaagactcaatttcaccatcccaactaacatttacagactattttaccctttcaccaagttgagcctgtacttttcaataccagggatgtgcagatacatcatcgaaagcgcaaatatttgagcccggcattctcggcaaagaatttgaacgaatacgagccttatatggcgatgcaaatacggaaactgatggaatgcttccaccgtcgcattgaaaactctggaacggtccaactggatttcaatgagtactgtgagtggcccaaagctgtttagatcaattatggaagactaatttctacgagcaaactacttggcattcgacgtgataggttaggccccccacaggtccattatcattattatttcgctgacgggacgtgtgcaggggattatgcatttggaaagccgttcgggtttcttgataaagagcgagatcacctcaacctgatagccattattgatgcacgcggcgaggttctcaacgcattgggtcatctcccacaaatcctccgaccgatcatgaaatattttttcctggatccattctggccaaatgggctacgcgcgacgtccaacttggcagcaatcggtacacaggcctattatggacggaaggatcagaaaaattctcggcatgacctccttagcttcttatttaaagcaaaagacccagagtctgggggtccattatccgagaaggagatcattgccgagtctatctcatttattgttggcggtagtgatactacaagctcgaccatgactaatgtggttgatattgtttctcggtccccggaagtacaaagacaattacaatcagagctggatcaggcatttcctggagtgatggaaagtgactgggtggccgattttcagactgcgaacaggctccctgtgttgaatgctgtgctgcgggaaacgatgcgattcaaaccaaccagtgccacgggactagagcgggtgacacctgccggaggcaagattattgccggcatgtttatcccagaaggggtgagtttggtttacctacacctactttctattgccacaatattggagaagctaaccagtaacgcagactttggtgagtgtgccgacgttgaatgttcatcataacccagctgtctttgtggtaagtgatcccatatcttctgaaagcaaaacctgaccggagattaagcgccccgacgaatatgacatatcacggtggctgggcagcgactcttcggcgttgcttgactccttctatccgttttctcttggaccacgagcctgtattggaagaaagtaggttataattccgtgttttgtttgtagccaaccagaggccccagcactaactttctgaaagcttcgcatggatggagatgctgaagaccttggccacagttttcaaattattcattgttgaaagaaccagaacgcttggcacggaagttcgcgagggtttctttgtcaagaacagtgaatgtaatgtggtggtcaagccgaggtttggacggaaagatagaacatgaggctacatctagagagttgtgaaaaacagatcagattgaataaacgagctgagcggaagtgcaagatggtattacggacatgctagtcaccaaaatattagttgtgtggacagcaactatgatgggccccagttgatgggcccagcttctcatgtgcaatacctaatacccagattaggcctcgccaaaacccgcccaaaaccccaacccgcctgttggttgataagtgatgcttcggtgttcatattattgataaacacccccccccccccccccccccccccccccccgccccccgcggggggatctgctattataccgcgttgatttgttatattggaatctagatgtgactagcactactccgtatcccgtatccatttccctccgtattccgtcctcccggacaatgtagctcttctccagactttcatctccgcatcttgtcgatgtctatcaaaaccgctcccgccacccgaaccagtcagatttccgtgtactgactggcgatagccctaactagcgcccaatcagcggtcaggccttgtaacgaaactctatgaaatgcaataatctgagcaatcgttcttctcccgttggaccgataagatatatagaggcaccgattacaggggtgatgttgtggaaagccgaatctagcgcatggcatttccaagatatggtgttcttatcctacggcgttctctccgaagaaccatcccacgtcttatccgggtcttcaaccccctcagatacacatcctgccctccaatgtaaacgtttccagatccatgcgcaacagatagtcggtgatacgttggtcatgattcttagcaaccgacgccagggcccttggaccgagcacatatcagctgcgagtcccgcaaatacatggggcaagtatacacaccgaggactcaaaaaaaagcaacctgaattctagatggactcctttctcttcaaagtggaatatattatctgtattttgcaatttttatcacgcgcgcgctgcgagaatggctatcgaaatattgtagtatacggctaagtactccacggttcctgatctcccctcggagctatcaccaaatgacgatcgcgcgattcgttatcgcggccatgtcagatgactggcccgtacagatatactcaagtaaagttgtaacttttatacgcgctcttcgtcggcctttgcatatctcgttcctgcaggacgtacccgctcagtaccatctggactttatcacgcgagtcggaccggtatagagtacatccactatacctctgtaatacaagactaaccccatcgactggagaagccagccacgccgcaacttgggatcgatcaagtcatagtcgggccagtggggtggaccgtggcgaaaggttctcgaaaccccccggcgtgaccaataagaccctttctgctagggccaccccgacaccggccatggataagagaatcaaggcagtattacaggtcaacagggcatttcggttattcatatgtgtgattacaattatgtactgtaagagtcacgagtccgagggtgatttttgggttgtggtctcttaggtaaacgcactgaagtttatattccaatatggatacacaaagggtatgcaactcgggggatttaggtcagggattctccaatgatttcaggccaaaagtcatatgacacctggcactattattttctgccagccaaatctgtatatttgaattttgatttacagaatacacaatgctgcacttaatgcttgtattgaaacaggtggctacggaggatgttgtatacagcgaaaggtcgacaggcgcgaaacaagaaatatcccgacagcatagcctctctcattcgcgcctcctcggttttacagaccgagagctggccttgtggcgtaatttggttgaatagtggacttgaagggatgacatatttcggcctgggtagtgagccgtaatctcagaccatgacattgcctctttttccttcagccgcaccagtagcgcattctcgtatgacgtgtacggtcttagtttccctggaataaccgccgtgtggggtcgagacagcatcgggctagggtcgggtacgaaagtaaagaaatatgccgatttcagaccagaatgagattcgaccgtgaggagagcactcccgcgtacatcctggaaagcaccagagtgatgagatgaaacgggatcggaagagtccgaagggtcggaaagtggcctggttgaaggtctccgtttcttcctcttttgacatagctgttctttattataggtggtgttcccatcttggtggttgctggtgcctcgacctaagcggagtcgcttcttgtatactgccgtagcggcccttttgcttcttctggcggctccttgcttccggaacggtgatggtacaaccacggctatcgacggatagcgcaccgggacattggaactcagtgtcgttcaaacacgagaacatcctggaggagagcgcacggtcggcgatgcggacaggccagatgtggctgaggtgtcttcagcagtgctggaatcttcagcccaccccggagcctcgtttgccctagagcatgggttttcacctaggtaagatgtctgactcggctccgtataatttttgtagcccccagggtatagactgtatgagggctccgtgtagataacttccgcttggctgattcttgttgggaatcacccgccacagataggttgctagaggcacagttcgcttgttcgggtgcaggcatgggtgcggtcacacaaggtacgcacgagagttgagaagtctccatttctttggtatcatgaacagtgtctaaaaaaagcggaaaaaaagtcagacaatgagaggatgatggcttacttcattatcatgtgttttgccaacatacccggtaaatcatctccccgcatatcagaaggaatggggtctagatgacctggcactgcaggagatgggattgttctcgcggagtctgtcaatggcactggctctgagaaagccagcgcggaaattccacgatctaacgaaatatcacgggtagctggcatatttgttgtcactccgggttcgacatctttcgtcatttcaggccgagtaggaccatagacatgattgatctcgaagtcaaatatgttccagtcatgagttgtaccggccggtggcgttgactgtcctagtgatacctcgcacggtcctggacggaagccgaacccagtgggaaaagactgctggaagtatcgtggcacatgagctggagcggggggcacgctttttgcactagtgcaaggcggcgggcgacttgggccatggtagaagtcgatttgatcaaggtccaccctcatttcccagaaagtggtaagacatagcggaggtagataccgacagataataaagcaataacctcgaataagagtgcagcggtaactgggctggtgtatccacgtccgctctgaatcatatccaaaaaatgaaaaggaggtcagtcagcctttttaatacccgggcgccgccagagcattactagctgggaatcatgcagtatatcgccttgcagaccccacacaaccgagaaccgcgacaacactgccttgttgatactactccctgcttgcgtcgggcgattacttgagagtactccgggcgaatttagccaacctgcctcgtcgaagggcgtgttgggtccgtagtacccaccgtgtggcgttgcagccttcaagacacctcagctgacaactgatggattgggaagagattggcaagaaaaaattcctcaatcccagcggcagcctacacttcgccgatcacgcaagccgatcatgcaagccatcaatttcatggatggttgtgatgcctcagctcagcgccagagctccttgaggcatttttgcggttggctagtgagcgaaagcgggtctaatgagcgactcaccgatgatcctcaaccggaagtcggctgaaagagcaaaggtgaccgtttggtggcgcgcggcgtggcattcgcgaaccgaagcctgagacaaagagcggccagtagtcctcgtacattgctcttcacatgtccatttatcaggcagcccgagggtgagatgcacaccggttaagacagcgaccctccgtagcgtacagtataaaacgaggagtgtatagagccatatagaactgggaaatcaagggcgaccccggtgacttgcagggtcagaccgacgactccttcaaatttccgcgagtggggaagcaggctgtgctcggggcgcagagtttttagctggcaggggccacgtcagtagaccagaaaatggcgccggcgaaacataatggagggggaaaggggagaatcggcgtaggaaagaagagagctgtcgttgagcgacgcaccgcgggttatatagatggcggacgtcgcgagacgggcggtgcgagacggcagaacccgaccggggctagggtgaggcgccaaacccgttacggacgggctaaaccataaatggacggacgcgatactggatcgggcgtgggtcccacgggcgctaaaccccaaggaggggggcgccgaaacgggcggcgggccagcaaatcgcaattctactcaataacaaacccgagcgtccttcaccgccaagcgcatcacgtgaccgtgactccagatctactcccagggagtatacccgggggtcaccagcgactccaagcagtgactccagggagtcactcaagggagtaggaacgaaagatatataaggacactccctcatgtacttagtttagttcttcgtcttcaatcacacattgttacttgtgtttaccttttggattactgtgactctttaacttgattataacttgacaacactcacgagcagaccaataccccggtatagatctactcggcgctctacctggcatcagttcctcgattgctcaacaggacttaggctacagtaaggccctgcgcggcaatagctcagttgcgaccgatcgttgacgttggatactagacctcgccaaaaacatttagagggcgagcatcgcccgccctccgcccgacccgcgagggcagagggcaggtaagagcccgccctcgcccggcccccc

SEQ ID NO: 20 - DNA, 60479 bp, Penicillium roqueforti
  misc_feature (49481)..(49792): n is a, c, g, or t
ggactccccaaacagctcgccagaccaggaaaagcaaggaaaacagcagcccaatgaattgccaatccataatgataaggaccataaactggaatcttcagatcatgtccctccattggtaagtaaaatccgtcagcttcgaattctttggctgaccatcgtagccctccccttcgcaacacgaagaagcaacaagacataccttggcgaccgagccgtttcaacccacgttgaaggtgctagcagacctcgaacgcaacgatcccaagtttgcctttccagctgctcgacttgttggactctaccgacgcctatgggagtcatgcgtttccaagcacatcgatgtccaaaagattgaccagagcaatgggatcttgaaggagggacggaaagctggagactgagcattttttattcctctcttatgaggacaaactaggggaatttataaccacatgctacagtaagttatcgaatgcgttgaatgtatcaacagcgtgcaccgttggcacccgtcaccaacacaacgaaagttcaccggcagtataagccttatctctccttagggaagacagaaatagatagcggaaaaacaagtgtcattattcccccccatagacgctctaccacatggacactttaccaaggctcaggctcatcgacagggtaggcttgaagatcgctcgctttaaaggctgaaacaacatcattacaaagagcctgaaccgctcgcttgcgctccgacaatactgaagcttgtatattgcagagctgtagaaggatatcgctatcgcttgctaacaagtcatttgacgcttgaagctgtcgctgctcctcctcgagtcgtattttctgggccgatttgacgacgtagcattcctataagtaaaagtacaagtcgagcaatttgagggctggtgtagcgagggagtcattgaggcttactacttttatgaactccgctataagggtacctcgtgttctcactggaacctattcagtattagtgggttttttttatttccttcctagagggggattgacctaccttaggtttaatagttgtgccgtttgaagcttattgtggttggttttccaacttgggtttatcttctggagcgtgagatactcggcactgtctcttggctggccgattaatgggggaaggcgaagtgggatggtccattttggtgaattggatcagaaattatgctcgaggggcatttatagctgataattcatgtgaggctactgttatttctactagtgcttccttacctagggtcgactgcaattttaaagctagtgaacagttagcttaaccgctgacgctcgatctcaccacctgctgagagcaaactgcttaggaataagcgggattaaatcgcatctatagtattgacacaaactaatacaaagtctatcttataatggtagtctataagtgtacttccgatgtatggatgctataaattactttcaaatcattgaagctttgctgtgactacaaactattcgaagtgcggaagtaaagataatttgattcccaatcttgatgttaataggcgctgggaacagctatctcgcaccacatcactagagctacctgaaatagatgtcgctagcccttacaaacgattaaatattctcctcggagaccgttttaacaattttttagtcgtgttgttgttataaattctgctctggatggccctctggatgcgatagtcctttactagatctagggatctcctcaaactgaagtgtatcagtctgggattggccacaagtgcatcaataatcgagaaatgtccacccctgaccgctaacatcaatggatcctcgaaccattgattccttaggttgatatcaattcggctatggcgtagtatttcccggactatctctaggtcaccgccacgggcagtaatgcagagagcagtgtcataggttgcgacagtgcttttattaacatttagacgtgcgccttgctgtactaagagccttaccacatcgagatgactatgtgaaaccgctcgataaatgggcggatctattaaaccccttctattgatctctacgccctctatactcagtaaacaagcaactgtcttcacgtgtccgtgatatacagcaacggaaattggagagtggcctgcaatgcagagattcagagcaatccctggcactgtaagcagccgttgtagaagtatagtatctaatcttattgcggtatggtgtaaagatgtagacggggactcaagtctcccacggcctctaacgaaattaatgtcgatgtctttctccgccaagagcctttcggttatctcgtcgtatgacgagtaagtagatagccaaagtggtgtattactatctttgtctttgcagttcacgttggcaagggggtggcccaggatcaaattgactatttctaagcgtttggtttgaacggcgagatggggtggcgtatagccattccggttctggatgttcgaattcaggcccttttgcctgagaagtcttttgacagcctctactgacctataggccactgcttggtgaataggtagctcagcctcttgtgatgatttggtactaagaaacactttggtcatcggatcgtttgaaaaaatcatttctatcacgggtctattgaaacgacatgcccaagaccacgccgactggcctgaatcatcttccaagttagggtcgctgctacttaaaagtagcagttgcacgaatcctattcttcctgcgaagactgctaggtgaagcgccgttcgcccgtatttgtgtttaatgtccacactggcggcgcggtgctctagcacgctcttgacgatggagaaacccccgtagtggatagcatatgacagggggctgtcgcgcgcttgattttggatgttgatatctagatctcgatggctgagcagcagttcacgcacagcagcggaagtgtatttcaacgcccgcatcaaaggagttttgcctcggtaaaatgcattgatgttggcgttatgccggagcaaagcctccccaagaccaacgttgtcgtatttgacggccaggtgcagcaggttgctgttctgaaatttgatattgtatctccagatgctgggctgcagtttaaaatcgaagtctttgcatgatttttcgagggtaaataatgcactgccgtccaaatgtgacacaatccacaacaaaagctcgttgggcagctctgtaaggttttgctgcaatgtattagctcatcggtaaaatcagcaagaaatcaaaacagaccatgaccggataggattggagctaggaagcaaatgaaatgtaaatgtggctgaggtctgaaagttggacgccttagatatctccctcagctaaattctgtggtcagctagaagtgtagcccgtcactccgctgaggcgcgtagcaaccacacggcagcatcaaagccttgacaagaatgtttgggcggcgttgaaggatctctggcgtctagctcccgggaacgccaaatcagttcctggttatgccgatagcctggagaccgaatctaccttggtacccacttctcacatctagcgccataagagtaaatcatagcacataacgcgcatcaaagttccataggcaacccagaatttcacccagcatttgtcgactttgcggctaaccgcagtagatagtctgttcgccaatacatggccatcgcgatggacagtcacaagtgcagctgattgcagcagtggtctggaatgatatcccttctcgcaggccactgattggccgtatagtggcgcatactgcgtgcgaatgcattctcggacgtaccgactgtttcaaggaagtgttccatgccagccacgtagccatataggtaaggagccacggcgatggcatataaagctggcgagggaacgctgcaagatagtccaacaccaattcccatccgaagcattttctgcctttgtccaccacctcaatgtccgccatgctgccttggaattcgcttcttgtttgtgagatggaagtcagccccaatggtggtcctggcttctgttgcaggatgacgaaaaaaaggggctccaaccaaaaactcggtcaaacgtgaagacaccaagataggccataaaaagctgaacactgtggccagagagctgtttgacctgtcaaacttgcaatcgaagctctgtgcttttgtcaaagaatctctctgtgcaaggtggcataggcaacgacaggccgatggggttggccagcagtggtatgaagcagctgtccgcaaccaggcgcgagtgtcacatgactctagagttgcatctccatccattgtgcatccgagccagcgtcagacatcgccagcctccaggcgacgccctgcatcagacaacactgaccggtcaccacctcacgggctcacacaagacccgccggggcccgtctcaaccagctccgagctggtgcaatcaatcaatcccgctgtcactgccgaaatgctgcggaccaacggtgttccatggcacgtttcgccagctcgaccagctatcctgacgtctgtcactaatatctgggcgggtgtccaagacttgacgctccagagtctcagcttgagtgaagagctcgaaaaagatccactgtgtgttttgtttggccgaggacgaggaacaagcaaacgaatgcgtgatcctgtgttgcgatcagtgccgagcgcatgcccatccatcctgcgtggaagagtggttggaaaagcgacgtacaagctttggcacgtcatgctgtgtgtggtaagtatagatggtttcaattccgtaatgctgggatgctgatgaatgctgtcgaaacgaaggaactctagacgcattgattcgtccactccgagtcctcttggcagataccgaaacaaactctgtccactcggcaagcgaatcatcaaccgatagcgagcctgtcagcgtcaggagtccagcacgaaacgacccgagtcagagtcaatcgcgtcgggggtcagtggaatccctaggggtatcaatcgagcagagtgggccccgtcgctcagccagactagcaggggctcacctaccgcgagattcttctacctctgcattgcttcgccggtcggcacgactgaattccaatcagcgtaggtgattacaatttacagcaaacgcgcgacggaaatgggaaattagcgaagcggctgtcaatcacacgtgactccatatcctggtgatatggagttttggagcaaccaaataaattaaatcctgatcgttagaccccatagagcactacgcgaccgtttcatgtttgcaagtgctagatgtcaatgcacctttaatgctattcgaagtttgcttcatttcagatacgttttagctcgaaaaccgagcgccggtagataaaagcgcacatacctaacggcggcggctaaagtaaatgccgacagcgagttcagctgagccttgtggagcgcgaagacggacgttgttggcagaaaacacagctcgcgcgtcggcaggagagcctcgacaattctatccatactgtctcgcgacgtattagaaccagctcatctatttaatcgacaaacattgttaatctgactttcggaatcaacagattgatcctggaaacgccaagagatattatagaagctgtttattccctggaaactcctctttagctcctggggtcacttcctgtttctaggaatttgaggtctacccctgggaatccacactacgatcctgactggttacaaactggctctgggaatacaatggctagatctggaagctgccgtgctcctggggccctacttttggatcctggactcattattctgctttctgaggtggcggaaagccctcacaagatacccttaccagacctgcgcacaaatatgagtcattcaacgactcctggaaaggcaagctatagccccaggaaccgcacctgaggttccaggagttgataagactgtctacaggaatgactttggttcctcgaggtggaggtacaagaccccagaagctattttgggcttcctgggggctacttggctcctggaagcggcttctttgcccccagaaaccacactgaagcccctgggagcaaggtagctcccagggcccagccatcatttccagggctgatagagcttgatcctggaaacctcaaaagcatttataggagctgtgtatcctaggaaactaatctactcctgggatcttcactctacgttgtgacggttcgtgggtgcttgggttttaccactacgccatctggccaaaaaggcacaatgtttggtcagcgaccaaacacccaagctactatatatgcttgatctctgacatacgttcctgaatgaacacgaaattggtttggggaacgcattgcctggatctgggcgcttttgcactccgagggccgtatctctgaatcctggagtcaatcttctgcctcccagagtacggtactaacttatctccagacctacgcacaaatctgagtcactttattattcccagatgtctagcctatggttttaggaaccggactcaaggctccaggaattaataagctatcaacagggatagcttattaattctccgaggtacaggtaaaagccccagaaactacgtcgggcttcccggggcctacgtggctcctagaagccgcttgtatgcccccataaaccgcactaaagtatccggcagcaagataactcctagggctaggatgtgagttcctatcactgatagagctgttcataggaacgtgactaaattgctaaaagtaaagatggatagttctataagttacgtacaatttcctctagctatgtgattcctggactactgacatgtcccagggtcagtttttgaagtctttacgaacaccaagattgatggatatttacacagaagatcgtcaaccatcacttatcctatatatcgagccactcagaacacggctccaatatcggccaatatcgaccggctagtccgatcaagcgatgaatatgctttgattccaatcaggaaatccaatatgtaaatcatctccgcaactctgcagtaaagcccctcctttaattgaacctatccgtcgcacctctctaatgtttatagactccacctccctcattcttcgaaaaccatcataaaattctgcgattgttcttattcgtaatacctgctgtctcgtttttcacagccctactctagtaggcagttggaaccgccactttgactgtgttataggctcagtacgcgttctctgctagtgaccaagtaagtcacgtacgacaaaacgcacaaagacacaatgaccactaaagatccgaaagcggcctggccaacagatccataatacataatattataatatggaatgtggtcctcgctgccaaaaaattcgaaggatatctgaaagccgtggacgcggctggcaatccaaccccctaaggagagcacgatcatgctcacgatgatttaaatgcaaccgtagtaaaaccgagcggcgcagttctcttatagccacttcgggtagatcacaaggattaacccgaagatagaaaacagggctgaaaccagggccgcaatcaccatgccgtcgacgacgttgtccataagattttggaatgtgatgtccaatatagagtcggtcggggtgacgaggtcggattttacacagtctcgcaggacgaccgcaaagtgtacaatggccgaactgagactagcaagggccagccaagtgatagtaagggaaataatgacaagacgcattcgtatcatggcggcggcagtcctcggagacattttgtgtccgcaagggcagatttagtaggcatgaaaaggtgaggcaggtgtcgctcaagggaacagttgagcaaagtaaagattaggacgcagaaggataaagcaggtcattatccccgggtactgtaaggttatatgtgctaggtaatcttcacgcaaatgctgcctctacaaagggatgacccagctgatactgagcggcgccgtataccatttaattaggtgtcttagtagcattccacggagcttttactagataagtatatttcaaattgaagcactattcctatgctcaaggccgatggcctctaaagaagtgtccggtctcttagtacggatccccggaaatcacccgtttgttcccaggatttactttcctgctactatattattatcctccttaatatgtgtcgtggttgcgcatatcacttctcaagtttggacgaacaccgacggaagatttctgataccgacgtagtttgccttggtctatttgcgatacattgtacttaaggaaactactgttgattgaaaacctacccaacagcccccagaaagatgtagtcaactcttttctatatcttttgttaagcttgcatttaacagccagtttctaagccatgacaaaaccgtcactgttaggtgaactaacgcggccgattaggaaacgagtttcaagtggcaaatttaacaaagtcccactattagcaaggaaaccaacatggctcagatggatatcttctataggcggaaaacaacatgctactggtgttcaatagtattttatgttcaacgttgatatcaacgttgattcaactttctgacaccattcactacccttatatcgcgaaaggtactggaataagaacactcaaaagatactatcatatcggcacaataccagcggattataatcaaagaacctatagcgttcagtgctcctggaagcacaaaacagacttttggccagtcggatccattatcgtggctgcgcagcgcggctgaatcatggccctctagcaacccccaaggcgtcagagatacaattcccttccacacattcctattcatggccaaatataacctatttaggaattgacaactctctccctcttcaattgcatcactatactgtagtcccatcagatggcaaagaagaaacaataatgtgggtgaatgatgctttcatggagatttactcgcatttatgactctaccgagcgacgccgtatttcgtgaacaaggggtcaccaagcagtcggtccaagcagctttcttccacaccgaccagaatctccatgccaccattcggcaaaactgggagcacaacttgacagccgttgatgcagccaacatggggcactcgtacagcctcaatattgttgcccagcagtggtccccattccaacctgtacagtttgaagttcacccatgaggttaacacgcagttgaagccggggacatctagaaaagcggttggtaccagccgatcgacgtcttcaagttgctctaccagagttatcacatcatccgtgaactgctcatcggcccgcagaattgccttgcggatttccgtcgccagatcggctaaagtcatggtgctgagcattttgcggatcggcaccgagacggacacatactctaggaaacaccctaaagtcgatggatgcaacttgggatctgtacgctgccgcccgtcaatagcaatattgaaaacagacacagggtcaccctccagagtgtctaggggcgactgtactgccatgactgtacgccagagtagcgccgcgagagcatcattggtcgatatccatttttgatcggtcggcttggtcgcattcgctggggacgcctctgccttcagctttgctaaagactccggggaaaaatagaaaatctgaccgcaatggctcagagaagacatctttggcgggggtcccgggggtgtaaaaggaagaagagtatactctggatgattttcgagctttccagcattatggccggtcggctttgtcacttgttcgcggtcttgccagatggcctctggaaggtggatgggatttaggatctctagtccctgtgcctggcgacactcttctgcccatatgtttgtccaagtataaaatgtggtaccgtcacccgccatgtggagtatgcaccacgtcaagatcaacccccctcggatgaaattggcctgtacaactgaaatcggcagtcgctccccagcggcaggccaaacagaacggggacagaacgtatcggcatcgaaggaggagacagggaaggatttatctttcaactccgcataatcagatcgaaaggactcacgtaggtccttgaccacaatgcgcgctacctcatggttctccagtttccgaaatctcatcacacccttttgtttcgaactgccatcgggaacggcttcgcacgcgacctctgggattcgttgtgtgagagcttggtacccggctttaagaactcgaatagcttcatccaagtcatactcctcctgaaggtgaaaggggaagatgtaacgaagatagcctttagggccgatacgttccaaaactgtgagctcaggaatcggttggttattcacagaacccatgttgtatttgggttagggtacccgggaaatgaaaagagaagtagtggtagacgggatgaaaagtacagagtatacgcactggaatacggggggtttatcattggcaaatttctaagtcacttggacatttgtacccttcgaattattttctactgcctaggctcagtggccattgtggtgagatagggatctcccgtttcaagacccattgaaggatgatgcttgactagggccatgcgagacgggacatcgcaatttcattaaattatagtgcgagtggcgacatatggattatacagggatatcaaaccgaggtattgattactaagatcacttacagcttaccattggtaaatcgctagataataccccgtatggagtagtgtgcaggctttggcctagccctaacggcccgaacaacgctgatactagctttcttttaggcgggatcggcgcttctccgacggcgatcgccctgaaattagcctgtataccaagaatgtctggtgcaacatctttatgtggttaaatgttcatctgcaaaagtacataattccaggagccatcagatttgattgctagagtgaatccatcattataggaactatctcattcgctccgcagattaatagctgatcctgctgtgtgcctcagttcgatgctgcgatatttctcccattaagtacgcatagtttgctatgaatgaggacccggccattgtcgctctctttgggccagccccgttgaatatcgacctcactgccagtgaggtatctgttaacaatggtgtggtcattgcaatgctgtgtctggctgctttgttggtgattctacgcttcactgctcgaattgtcctccaaaatgccttgatggcggatgactgggcaattattgcggcactagtgagttaatccttcgccagtttggatcacctttgttgactgtattggatcgaaggtttgtataggtgtctcagctggaataagtgtcgccggtgagtactaaacccccagcaaaagaccattgtttaacagagcaacgttgtacataggcggcactactggtgcaggaaaacatatatgggccgtcaagctggaagaattagtggacttgtacagagtaagaaaatgcccttcaaaagagcgcttgacttttctaacccagctttatttagcttttattctcttacacgttcatttatgcctcgtcctgtacttgcaccagactctccattcttttcttttatgcgcgaatctttttccctttggaatcctcgttgaaagcggctctcattgtcggattggtactcacactctcatatcctatcattatttgggtaactatgggcaatgcttgcaaaccagtgtcccacttttggacacaattcagcggcgctgaaggaaaatgcatcaatatcaaccaattctttctcgcactagggattctcaacatgctaaatgatctcattattctgatcatcccttttccgcgaatagctcggctacaaatgacccttcggaagaaattagcaatttgtggcatcatggccgtgggaatcttgtatggcctctttgcttttctttttaagcctcattccgtgaacagagctgaaccatttatcctagtgtttttgttgcgagcatcgtgcgaatccattatctctctgaattcatgggcgccgtggacgtgacatggctgatgggacccgtattcatctggtcaaccatcgagccatcggtcgcggtggtttgtgcctgtctgcctcaccttgcaccgcttgctcgactcgtccatcgatcaatcttatcaagtttgaattcacaaagatgcactattattccagaaagaccaggactccacagtggttcgggggagggtctccagagggggaatcaaaccagcaaccggggaccaacatttgactacgggttcgatcaaatgaagaggaacgcaaaagacgatgaaatgggactaactaactatatcaccgccggtcaaaatgaggccatgaatccttcgaatgactccatatccgaggatattggtcataatcactcaattgctgttcattcaagtcttgtgcaatcggcctcgctaaggccgccctggtagggtgatactatatggaatcaagtccctactgcattagacttggagaacacaataccattccatcacccgctttcataggaggagatgaatacctaacatcgagctaccggtttccttcatatcatgtacatatcgtcagaaaagaatataggcaatgttgtcttatttcaacacactttaatcactggaactcgcttgttggccgcaatcctaaaccattcttctcgtacgccatgccaattatcttcatctgattctatgaatccttacccgtaacccaatattgtgtagaacaccccttaacacgattgataaattcttcaagttggtaccgatatgacatcccccagtccttaccggggagattcgcaaattcaccccctgcctccttgtaactgtaagccttatgtgccttggactcggtctaagtcttgaccggtatgctatcactcttgttacgaataacgaaggtatccttgatatcgatacggtgctagatgaaagtatggataaaaccgtgtagcgttaccgcccgtgtgcgtagcttctcttgcgacttcggggtggacttgtcatcgacgacgacttacttgtgtgtgacgcgggcctcggacagtttctataggataggcccacgtatggtggtggaagcttcggcaatactgccattcgggaagcgaaatttggctttaaagttagtatcacactggttatggatgctgtcaccgaagatgccaggttcgcaggttagacactcctcgggttctatattaaagattatgctgataacgccgaaattgtatgtgcctattatcatcatgctcccgccggcgagtttgtagttgaacccgatgttgtccttttcgagcattaaccatggaaccataaagtctgtatggaagtggacgatatcagcgggggtgatgaaggaccggaacttgtgcactgtaggatggaacgggttgtggaaagcctcgagcaacacgggggacatttggccgttatagcttgggtaaattgaagagaatctcagcctcaatggctttggagagacggcttttctaaaaggacatgcttgacggcacgaatggtgcgtatggcctattcgaagtgtaaactgttgggtaaaggaatcaagactgcatcgatcttcgggtcgtccaggatttctgtttatagtgagacggggctctctagtaagcctctaagtctaacgcaccctcgtaggatgtgcgaacgccggggatgttctgcttttagagaatgccgaagcacaggcatgatctctagccgcaatcgcttgcacgataacctcggaatgtgagagggctggtgtgatcaaggcgagaggtctatcagaaatcaggttcagcgaggcgaccacttcggggcatatggaactcacgcaatctgggccgcccccaggatgccaaaacggatagcatcgttcttcttctcgacctttggagggccgaatgccgtgaaaactcgcataatcattgctgccattgtatttaatttcccttgcttggaatttcccagagacaaacaatacaatttaatcccaaagtgggaatggtagttgtaccgtcggggtgaagattggaccgactaacagggtataggaaaggggacgacagggcatagagtggctaatacgtctcgatagttgggttcatcacaacctatcgctcgaaacatgcggaccattgaatttgccatagacggcgctattgacggcggtatcgcacgacaatataaagaaaaataaacctcctcacagcgccgagatcatgtggtggggattggataaaataccacgaatagatacacttggaatcataacggattactatcgatgtatgcttccagcccacgaggctggatggacctgaccgtcaattagatcgcacaggcttaactaaaatcacacagagcccgatgacgtttgttcatctggaattagtggatctgacggcagctcaggttctttgtttggagacagcttcctcgttacagacgagcctacacttctatcgctgacttttaacagatatgtttcttatgtctacgagctgaacaatctgactaaagaaaggcttccgaggtaagtaattgtttgttgaaacttagagcacaatcccactaactatccatgatcctccctgagtgccgaaacataaagccccaagttgtgcgataaataatctttcggccgatagtacatatggagactcatcgacacaacgagataggcagtgatttgcaaaatagaaatagatggttaatctcaaccgtagctgtctgctatgatttaatcgcctattgtctcggccgggtcacgcttctttctcgaacatcaatagaaagtaccttgaatcattgtgcttcatgtccagctttaatggggctaatacagtgcgtctggtttcttttgaattagttaagctctattctatttagtaattccctattccgtatttcataaaataacggaaaatcaagccaaacaaaataatttcctccaccaaagaatgaaaatatcgcgccccctttggagttcatcctgttcacaaccaagagacatggccacggattccgaaactagaaacggtcgacgtaggtgatagaaggtcattcggcaaagagggcagctggcgtcatgtgtacatatccacttgtcgatgcaaggtttgtgaaataggtgctggcatggcaattggcgaaagatcgatcgagagctcatatccccgagacaaatggtacatatttggatggtgacagcctgtcgagtattagccctggaaatgactggcttaggcctcatggtgagttacaattccggttgagcccatgtagcaaggcatgttggctagttcgatatccatcgcccggagtggccctttcttagtccgtgaagggacgaacatatacgaatcgaccatgatatacaatttcaccgtgaagaagttccgtcattgaacgggaatagcacaggaaatagaagggatattcgcactatgtccaatgctacgtttgtcaattatatctacccatcactatatacgagatcaaactagttaggacgtggttctttcgaagaaaatatgaatcaaggagttacttccatcatttatcagaattattacgtaagttctccgtattctttcccggctttcccgctttcccggcttcgaatttctcgcttgcttccacttctgctcttgacaacgtagggataagtgggagtaggcttaggaccagtttctcctcacgcggggtgaggagaaagaaagtacgtattgatctgaattgcaacatgaatggcctgattgagaccatcaagacatccgacccggtcaaaccttccccggacctccgacttgacgtacaagggttgatgtctatatctctcgcccgagatagcccaccaaatgaagacggtgatgtcagaccgttatcatcattgaaataactctctctagggatggcttgtcagtagtataagtacctgcttgtctgcctcagaaaactctttcactgcgagaatcaaattcaatatcacctatatcaatatatttttcaactttgccttacagacatccagcaatcggctcacaatgtcggaccccaacaatcctaatatcaagattagatccactccacaatggtctctctacagacgggatgcattctggaataccaacaatggcgtctatccgcttttcaacacggacccagctgaggtcgagaagctcgcgaaggagaaattgtcccaaggcggatggtaagtttagtcatccgaagcataacatctcatcaacttatccatctaggtactattcgtcatgtaatgcgggcatgtcttggacccatctggctaaccgccaggcattctaccgccaccgcattattccgcgcactctagtggacacgaacactagagataccgtgactgagatcttcggtcatcgagtctcggctcccatcggcttcgcccccattggtatcaatcgcatttatcatgctaccggcgagctttcggttgccaaagttgccgaggaattgaacttggcgtactgcctttcctctgctggtagctacagcatcgaagatgttggaaaggccaacggcaacggtccgcgtttcttccagctgtaccagagccacgacgatgagcaggccatttctatgatgcagcgcgcctgggactcgggctatgatgcatgcatgctcaccaccgacacctggtctcttggatggcgccacaatgatgtcttcaccggcaactacgcattctaccacgatcacggtgtaggtgatattggcctgcaggaccctgtgttccagcagcgcttgaaagaggcaggaatcgaccctaagaaaaatcccaaggaggccggtgccaaatggatcgacgagaatatttggcatggccgggcccatacctgggagaaggtcaagtggaccatggcccaatggaagcggataagcggcggtagacctttctgtttgaagggaattcaaagcgtcgaggctgctgagaaatgtgttgaaatgtatgtcgaggagaatttgcgagttcatccatgaaaaatgctaaccccagcgatagtggcattgacggcattgttgtgacgaaccatgccggtcgccaggtggatggtgccatcgctagccttgatgctctggaaaagattgtcgatgccgtcggtgataggctatacgtaagtgagaacatgttatcagatccccccgagaaagacgtatcgtgaacgcataaggcggaagggaagataacaaagacttgggggatcggagaatactgaaaccatgctaatgtatcgacgttcgacagatcatgttcgactctggcgtgcgcagcgctgcggatgctttcaaggctcttgctctgggggctaagtttgtcttcctaggtcgattgtgggtttggggtttgagtattgctggcgaggctggcgtgcgacatgtgatgaaaagtttcttggctgaatttgatattctgatggaggaggctggattccaatctattgaacagattgataggtcggctatcgacagccttcccaacacttcaaatttgatctctgaacacagtcggatttgagttccatcagggtttgggaagacaacatggagctagttgtcgtcgtgaaaagaaggcgaattagaaaacccccttgaaattgtttgactgttggggaatctggaatccgaaattattgaagtcgattcttcttatgaattctggaatgtgtgtctgccttatgtcgcgaacgtattgaatattgagtatttgatttgagcaggcaatgaacatgattttacataacccaagtagtatttaacacggcaatgcaatgcgctccgaaggataccaagcacaccgagctcgactcaaaaatggtggaggccctggctgtagtaggatctggagacttgccaggggtgctttccaatattaggggtcagcgcctcattctaatataacaagattagatttcgtaatggtaataggaaaaaggaagctgagagggtagctctgaagtggttgtgaacgagggcgatcaagaatattacgtaaggtagacgacagcaggattttagcggtgaatggtttctgccaggacgaggttgcgaccgactttccgttgagaagtcaaatcccaccgagaaaaaaaaaggtattcattcattctaaagacttttcaatctttgcctcttccaaaatttccgagtggttcaggttatgagtggtgcccgcactcagaatcgcatcacgcacccactgccccctcggacgcatcactgacctaaacggcttgggcaaagtgacaaaaccctccgtgcagtccatatcatggaccttgtgtctcgcgcctgtgctctcgtccacaacgccagcctcaacatcaaatgaccacagcatgcgcgccatttggatgaatagctggttgcgcgcgatgagacggcccgtacagattctgcgcccgaacccgaaacccgtatgcggtagatccttgagggctgatgtgttgaagccgcagatgtcgctatgctcattagcggattcttcggcgagccaccgctccgggatgaagttgtcaacgtccccgccgaagacggcctcatcgcgagtgatggcgaatgcgttagggaggacagttgagttggcggggatatggtagcccatgtactcgtcctcggtcttggtgaagtgtggcacaccttggacgacgacggggcgccagcggagggtctcgctcgctgtgtcatgtcatgtgagaccttgcccattgtttgaataagaacaagagaaactcaccaatagcgtcgatgtaggccagcttcgggcggtcttcaaagttgggtaggcgatccttaccgacgacctcgtctagcagctgttgcgcctttttcacccagccacgcgaccccgacgtaatccaagcaacgataaaccagtccagcgcaacagtcgaagtatccaaaccagcatcggcaagaatgcctagatcaaacgcgagctcaacctccggcattcccgcagcctccgacgaagccttcatatgcttcgcaaagttccacttgccgctactcagccccttcctcaagttcccaacatgcagctgacgctctagctcgaacagctcctcgccctccttcttccacggcgccagaaacttgggcaggtgattcagcgatgggaacgagtcgacaatgtatgcgcccacctgcccggtgcgcgcaaactccgcctgcacgcgcttcccgtccatcagctccttctcgtatcccgtttgcagccggtagccgtagttcagacagtagatggtactggccattgcacgctcgaagtggtggtggaagtctacgcctttctcgccgaacttgtcccactcgcctagcacgtcccatagcagttgctgcgactcgaggtcctgtagcgggcggtagttgctcgcagcgcgcagggttaggagcggggcctccatcttctgatgtagtctgtactggccgttgtatggtcggaggagcatgtgcatgcccttagtgacaagctcgccggccatgaccaagcgtggacggtccgagtatcgtgagctgcggcggttgaggagatcgtgtgcggcctggtgagtcgacaggatgatgagaggctgcccagccatgctaaggtgcatgatcgggccatacttcttgctccagtgatagagctccagccactggaggctcttgggcagctggtgaatatttccgattagaggtacgggcttgggtcctggcggtaagggcagcgaggggcgtttgaagagtgagaggacaaggcgggcgattacaatcgcgccgagagcgccgagtagataggttgcaaagccgggcattttgctatacctgcacagacgaggcagataagtgtaactgtgactgcagctggaactgggttggcgagcagaccaagcaggccaatttaagtaccgtgtccctccctctccgtcgggttggcatcgaaagatgtgtggagtggtactattgtgcagaggccaatgagtgctcgcagctatttaatccagatgctcattgggctcattggggctccttcgacagcagcaccatactgtcctggtaaagtggaggatacgggcccgtctaggcttggagaagtaagccatatctactgatgggagtcgtgccgagtcgtgccgagtagtgcagatcgcgtggtcagacctcttacgtggatcgtctagtgtttgcaatctttcccggccacgctaatatataatatataattgctacgcttcgctccgcaactaacgtgtgggagtggggggcacggctcggggcacggccgggattgctgttggatccgaagggacacggcccgaaatcgagccgagcgttagcaagtgggccagacatcgcggttatttttgttctagtctatgttggaagcttgggattttaatattgactccaggctgcttaccttcgtcaggaatcctggacgattccgaccctaccctggacatctgtcaagtgccaacactcatcgcactatttgtattggctacagcagtggataaggtacttttgattgggaatagtctgtttacatccctgttagcgcagaggctgggatactccaaggtttgctaggctaacggtctcctccggaagctcgagtctagtcttcctattcgctgatatgggggggatcgctaagccccttaatagaaccaatttcccatctcttcccggagagtgtaagaaaaagtacgtttgggggccgttggatgccatttgtgagagcctgtacagagtattccaatttgacccatccatcagggtatggctagaataggggcgcccacagcaaaaaaaagtaaagaaaaaaatagattaaactagtaatgcctggttgtccaaaaaaatataaaacgaatatagtgattaagaccaagttctaacgtgaagctgccgtcgaggtgccccccaacgtgccgatttacaggtcccgattcgaatcattcttattctttctgctttcgccgtgtctctgtgtctttgtgtgtgtattcattacagagcttctagtcgagtgacgaaggagtcctaatgcggttagcaacgcggctagcatttgccatcgcagcctttacggctattgctgcgacccagaacattccgcaatgtgcagtatgagatctctccaatgatgaaaccgagtcacggctgataatgaccgctaggccgactgtctggccgcgggtctcaagaattcgacatgtaccgcgacagacgtcgactgcatatgcgccgacaagacactgatggccaatgtcgaggcttgctcactgggagcctgcaccgtcattgaaggacttggtatgccctggaattctactccttgtaatactgattgactaggctgactccatatccccagagtccctaaatgccacggctacgctctgccactggccggtccgggacaagagtcttatcgctcccatcgcgacagccgttaccggtaccttggctctcgcttttatcagcatcagagtggttgactgtgctgctaagaaggagttcaagtgggctgacctgtgcgcggtccttgcatttgtgagtgtgccacggtgtgatcatggaagttaggagtctggcagctaaccagcagattagatcttttcgttacctatggacatatttgaattcttcagtgtgtttgtcctcgttaacttgagttataggtttgtgctaacagcaaagcagtgatgggttcagggatgggaaaggacgtttggaccttgacggaaaaacaaatcacgaacacagcgaaggcaagtatcattaggcaaaaaatgagttccagactggagaactaacagcgtggatagtatacctgggtaacccaagtatcgtatatccctgcaattatcctgaccaaggtgaccatcgtctgctttttcctacatatcttcccgggccccagattccgactgctatgccaggggactatcgtccactgctttctgttcatgatttcgacttttatcactgaaattcttacttgcattccggtcgaagaggcctggtcaggctggaagggcgaaagtacagccctatgctataatagcaactccttctggtgggcgcattcggtacgtcgacttttatcacttgattgattggattgagataccaactgactgaccctaggcaatcaacatcgctaccgatctatggatcatcggcctgcccattccaatgctcttcggactccagctcaagacgagtaagaagatctacctggttctgatgttcagcatcggtatcgtgtaagtagaacccaaccgtcaactcctgcgactcacttctcacaacttgatagaatcacggtaattagtattgtcaggttctcaggtctgctaaagtactctacgacatcaaacttaacatgtaaggccgacgcctttcctgctcagtgtgtttacttctatttcgtgcccaagctaaccaacgtgcacaagacaacaacgtcatggtagcaacatacagtgtcatcgagtgtaacgtttcgattatgtgctgctgcatgcctaccctactttccacccttcgccgagtcttccccacgatattcggtagtaccaatcgctcttacaattacaactacaattacaacaatactccctttttggacaccaatgagatccaaaagtctgttacacataaggtgacatacacgactcccgatgggcttgaggatgatgtagtcgagttggtggatagaggcgaggattacccacggaggaaatagtcaggtgggcgagaatgatccacattaatacagactttgtatgcaagtgtaaataagtgagagatttcctatttgttgcaggttgggtagatcgtctacaccgatatcggtcttgtgcactacatacattctgcgccctcgaacaaccacagagggcgtttcttagcaagcatttcccacttactatgtaaattattatggtattgctagaaataaccttggccacacttagccataggctaataaaccttacaagatcgattgtgataccgctgctagatttcacaaggctactcccataaccactataatatataacgtccttgatcctcaccatttttttcattcaaaatatagaattactattggtacggacgtatacacgtgagtggccagcttgtatgcaagggaaattagcatgaagcaaatgcaagaaagagattcttgagactataatttgcagctcctaaaccaaatatgtctcagagctggtcacctgcaaatttctgcatttttcgtctttttgattacgatccaacggaatcgattgaggtgcatgtctgagaggcgaggtatcgtccctgtaattcggagattgtctaaaaagaatggaagaaatgttcctcgggagtgaaggtatagcaggcatgcaggcgcagataataggaacgtcgcactctaaaacactccaatatattgctagagtgttggcatctgtaaatcaaaagatttagcactttcgagagacttttagcaggaaaagactgacatgtagtgttgggagatttcgaaaacttgacgagcgaccgcaaccgtagacaactgactacagtgattctaagatctcgttagcactacgagcagggcttttggctgtgtgtagaagcggccaaattggaagaccaattattgcgagatccatcgcgatttgcaccgctgccttgtaccatgaatatgcgttgatgttggtacacgttccttggtactccccagtccaaccggaccagaagtatgggataggtaggcactggaatgtcatgacaagtgttggagaaaccgaagcaagctgacaaccccatcaatacgtatgcaatcagctggaactgttctgaaggaaatatgcgtagatagaggggcaagaagaataaatgtctcagggcttcggctgccatgtaacagatctccgctagcataatctgcttaatgggtccatggctgaacagggcgggatcaagcggatcaaagacatccgtcccggctccaacttcactgcttccaggccaatcatcgctaagacgatgttttgcgaccacatgattggtgacagggccggtccgattcatgtgggtatgagggtgaccccagcctccacacagcccgaagtcacagatacaaaagcgacttggcgtgttttgactggacatgtccatgcaaaagtggatatcgccggcacttgtctagaaacagtgcgcactaaagcaaaagcacgaagccaagacccccgcttcctgttaatgactaataaagaatgcatgaggtaagagcgggctgtcgccttgatatcttggaatcatttgcatttcctgtgcagtgccaaaagcacgcgtcaatgatgatcgccagccctctaaacgtgatcctcagcgtgggaatcggggcaatggtgctgtatgccatggtcctgcttgctcgcagaagggttcatgggccactaccccctggcccgccgggaaaaccaattctgggtaatatttatgatctgccgcctccaggggcgcaagattggatgcattggttgaaattcaaagatcgttacggtaagacatgtcatttgggacaccggcgaaatcatcattggcagtctaacatctcgattggcttccaggacaaatcagttctatctctgtcatgggccagaccatcgtgattttgaatcatcatcaaattgcgatggaattgctgggtaagcggtccgcaatatattcctcgcggccgaatctcgtatttgcgtcacagatgtaggtcgacgagcacaaaatgaccacactcccactaaatcctggataactagggtgggttgggagcatattctggcaatgcaaacttactccgaccggttacgtgcctatcgcaaagcaatgcagccatatctcggctcggagactgctgtgtctcaatataatgaattgcaagaggtggagagccatcgatttttattacgtgtactaaaagatccgaagaatttgatccagcatatttcaacgtaagttgagcgccgaatctcactccattgaaatagctgatggattcattcaattcagggaggcgggtgcagtcattctcaagatagcatatggctataccattgaaccagacaagatggacccattggttcatattgcaaaaatggcacttgagcaattttctgtcgctggaactccgggtgcctggttggtggacgtatttccggcctgtaagtgaggcatcttgcaaagacaggagaaacgatactaaataacgtagtgagatacatcccctcttggttccctggggccggattcaagcgaactgcgcaagtttggaaacaaaatcttcagcatgttgctgataagccttatgcctttgtgcgacagcgaatggaaagtggcaactatgatccgtcttatctgtccaacctatttgaagcaggcggatacccaccaaatggaacagaagaagaaatgattgcgaaatggacagccgcatcgttatatacaggcggcgctgacacggtatgttactactcttagtcctaagaccatctagactaacgaaaccgagaccgtctcttctgttcagacctttttcctggccatgaccctttacccagaggtacaacgtaaagcacaagaggagattgaccgaattttgggcggtgctcgactgcccacggtggtcgatcgtgcaagcctcccttacgtcgatgctgtagtgaaggagacccttcgatggcatcctgtagcgccaatggggattccacacatgtcagtcaaggatgacatgtatgaaggtcatcttattcctgaggggtccttggttttggccaacatctggtaagtctggtctaaattttgcgcaagatcgaggcgctgactatcactgaagggcctttgcgcacgataccgaagtctatcatgagccaatgaagtttaagcctgagcgctttttgaatgttgatggccgggagcctgaattggacccgcgtaccttcgtctttgggttcggtcggcgcatatgccctggtcgcattttggccgactatgccctttacttgattatctcccggtcactggcagtgtttgatgtcagaaaagaggtcagaaatggtcacgaggtacatgttgagcctgagttcagacctggggtgattagccatccgctttcttgggagttcaatatcaaaccccgatcggccagctgtgaagcgctgatcagatcagtggaagaaaccaacccttggaggggaagcgatgcagctgccctggatacttcctgatcgcgtcatcatctctatgatgaccaccctcagagatcaaaccaaagattttaccgggcgtcttgctcgtcgggcagggccgctttggcctgattcgcgcctgaatttaaaccgcttttaggcatctctttacaatgtaactaactaatattgtaattgattcctggatggaataacaggcccaaggatcccatgaacatacagcttttggcgctatataaatgcagttatctccatttttccaggtggtttactggcgccgtcatacatgaacatgaagctattcggaaatcaccctatcactatggagtaatttaaatagcatccactaccactaccaataacgaagatatttcaattctcaaaaccgcatttaattgctagatagtagagtgatcaattggctatgtaagatactgttggcacagcgattttactattggcacagtgattggctattctctatcatatagcatttagatggctttttaggaattgaactatgtctattattggtggtggtagatcgggtgatctccgcatagcttcatgttcatgtatgacggcgctagtaaaccacctggaaaagtcgagataattaaattgtatggcgccaaaagcttcagttggcataactaaggcggtatacctttctgccaggccaaattcaggaattaagacctcaatcaggccaaaacgaccctgcgcgttgtgccccttcgtactatagagatttgtatccaagctaattcccctcaaaattccttattcgtttatcatgagtcatattctgtgatcagtgatttgcgcgccctcttctttctgttttcgttcttctttgttcatattggccccatacgaaggatccatgcaaacttgggtcccattggctgggattctcccaggccgagctaagggcatttgcgccattttaattggcctgttcgggggggttttcatgtgggccatgtctcctcggagtccgtacctgaaggtgaggccgaagtaaaagccccgaagcacgggaacagattcattctcggttccacttcggggctgcagcctaaatactagagtactttcaaaagaatatatgaccagcatgaacatccttcccctcgtttgactgtaacacggctatttaatcctcccccccggccacactccaagtatttactgctatctatcagtatcttagcgctttccatcttacgccaaaaccctcacgacacacactacgttccaactcagatagcgacaatggcatcacctgcgccatcgtacaccaagaccactcactctgccacatatgctggcataaatccaactcagcccagcctctctactgcgggcaaggttgtggtgattactggcgcatctggcggcatcggccgggccacagcctcatccttcgctgcatcgggcccccgagccctcatccttttcggtcgacgcgccgacgccctggcggaaaccgccgcccttgtccgcgacagccaccccgaggtgacgatccaaactcacgaggctgagctatgcgatgcctcgagcgtccgcgacgccatgaacaaggtggctgccgagtttggtggtatcgacatcctgatccactgtgccggcgtactggcccctgttgttccgctcctggaagccgatccggctaccttcctggacggctacaagactaccgtagtcggttcactggtaacggcacaggctgttgtcctggctaacaagacagtcagccccaacgaggacaagccaatcacattcatcaatctgaccacggctggcattattttccccccattcgccggcatgggcgcctatgtcagcagtaagatggccgccgtcaaggtcctgcagtccttcgccgtcgagaacccgcaagtgcgtcttcacaatgtacatcccggtttcctcgaaacagccatgtctgctaagctgtcagagtccattaaattaccatttgcctttgatgaaagtgagtatcaactgattttgtcctttgtggttagtccgtctctgtgatccattaactaatgactactcttttccagtctctcttcctgccgacttcctcgtctggattgtctcccccgaagctgaattccttaagaacaagatcgtcttctcttcttgggacgtcgatgagctcaaggctcgcaagaacgagattttcggtggcccgccgggaactggtgagctctggctcggctaccaaggattcccacgattcataggtggtcaggctttgccaggtacccagtaggcgatcggtttcggtatgagaagccaccatccctggctggacggtatacatgcgcgcgttgattaagcaactacacgagccattcacataaagtgctagcacgaaaacctgaatgaaaaataaaatctataattacattgcttgctgtttgacaaccgagtaaagctgagagcacctggatggatgatttctaggcggcaaattggtcaatctttgctatatcatcaaccagacgcagtgcaattgagatgcccatattcctaccaaagtcttgtaggcgttggatgatccaccttctggtctcagcttttgtggctgggcattttccaaccatgtacaagcaccaggtcaggatatacccgcctgacacgctgccgcggaaggatagatcgacggagggagtgttggacgcggaggataggaattccaaagcctgagggatggtagcgagtatatcatctcctagcattgatagattttgcattgccatttgaacctttagctccagagactgccggacggccgacgtaagtgtaaggtctgtcacgagaatcttgttcaagaggtataacatgatctcgtatacgatcatttgaagatttctgaggttattccacactctgattgcccaagtgtccttatataggtcaactcgtccattatagcttagttttggcgcccagcaagcattttgggtgactgtatagggttcttgtgtggcgaggagcaaggcggtgtgttggaattcacgttccatcatagtcgcttcctccaggtattcaggccaaggaacttgcctagtgttcgccctgactcccatcaggaggtctgcgcaccgggtacctaagatccccagaagccaaaatgcaccagaggcgtcaatgtgcttggctgcctcttcttgaagctggatcatgtctttcggaaacggttcttcgttatggacacaagcaagcacaagatcagcgcgaacttggttaaacatgaggatcgtggccgtgctagtgaattggcccttgccccgggcaactactaacgctgcagcgccctggacatgtcgaacccacgatttgtgctcggagacatgctcaaacactcctaatgagatcaccgacattaaagtgctgtccttgacggactccacgggcgatgttaaggcgacattcacattgcggatcgcctccgtgtatttggctcgcgcgaggtttgccaggtcagactgttgggtcgaattggccaaggccacgagtcctacggccgccatgctggccaccagagtaggatgctcgccatcttcgcgataaacagaaggaatatagttcaggcatccccgtgaagaggactgaccgctgacaaagttgcggaggaagtaattgacacctatgtcgtcggcgttggggctcaagctgcgggcgggggcaggcaaggcttgggcgggactttcgatcttcggtttcctgtatcgctgtatggtttggtcggtctggtcacgaaagacgaggtcccatttatctcggtacccaggacattcttggcgcattcgaatgcactgtccacaatggggagtctgctggtcgcactatgtagagacacgacaaattgagttctgacctgacagacaagaggaaaataagcagagcaaaggtagaacggcacttacacgtcgtttgacagcccggcagttcccacagctcctagaggctcgagggcgaaacgagttgagcggggccatatcgatacgccaaaaggagcgggcaaggacaatggcacaagagagggcgcagggtctgtcggaaacccgagttccctattccctagcaagtctaaggaggcactccccaataggctcagctcttagtctcgtgtccgtgtccagctgaagatcctccacggtcggcccctcggcccccacctgcagtacggatacccaggtaaccggtactgtgccccagtcgaaggaaatccgcgcggtacggaaagacattcggactatgatgagtcttcgggtgctattacagcctcgccgtcgtcatcacggttacacaaaaaccaatccgacattggactgaaaacatgaggactactcgtcccgtggtgcgctagtcctagttaggtcttttgataagtcagccagtcgttctaaatctttgagaaatacatctctaactgctgacatttcactatcaactctcattttaaagaccagaaaatccgacagtctgtctaagtattagcagccagcgctactacttcagtgacatcaaagacatcaaggccgagagccatccctcctgtcccatcccttccaaggtctccctgctgcgcgaggtactgtaacttagcaacggactccttcagctcttcctcggtaggcatgttgacgatcatcagatacatcacatcctccccaaggatcttaattctactgccagtttccttcttctttcgggcccacttctctttccaggtttcactcgggggaagaccttgagcagcccgcttcttgtcctgggattccttgatggcagccccagcacgctcaaatagacttggcttaggctggtacaagccaccgctcaaggtcgtgagaagttttccactattcacgggatggttggggtcattgtagcgtgaagtgaaggccttgcgtccggactcgggaacagccagcgcagaaccctgatgctgggcttcctatttcctgtcagaattgctctatcgatatgcgagggcgtgagtgaaggaattggtactcacgaatgatgcctgggactttcgatcgatgtagtcccgaacccaggttcttccactctggaaattcgacttgggttccaggccatctctgacccgtatagcagctcggtcaatctccgggaaaactagcggtgcacactccggaagctgcatttcgcctctagttgcgccatctcccaatcgataatgctgcatgcgttgcttccaagcgttcatttgtgggtgctccttgctgtgagtgtactttgaaattgtcgctgccgcatcgaattcaggtctttcgggctgagacaggccggcattgacctcacctgtcgctcctgattgattaaaattgatctgctcggttgagaagagttggccaagtcgattagcttccgagttaggggagttcgaatcctgttctctttgctgcttctgcttcttcgtgagcttgggaggctgatccgtgaatttcatgatcatcgcgtattgaccacgaggaataaagatctcttggtttgccctatcgaggtagctattggtacggtgacgaatttgaaattgctgtgctgtgtccgctacaatctggatagctgcagcggtcaacgcaactgctaatgaaggggagaagccagtgatgttggctgcgcaaacgatgacctggagccacattgaagcctgtgataagagtgagtaagtaaacgcaatcccataatggtcaagaaaaggaatggttgtcaccaacctgactagctttatgaaagtcgctgatgaacttcaagaacacatcttggctgataccgcagtcggccaacacgggcgcatatgcacgcacaaatcctcgcttcttcgcgccaggcctgcgttgaggaataattacaggatatgggagtcgctgcggttgagctggtggtggcccagccagtgccacgagtgagcgaatcatgcgctctcttttcttcgccttctcatcttcagagtcctgtgcactaatctcatcggggtcattatcaacactcatgtcgaagtctttctgagcacctttcggaccagggtgagtttctgtttgatcatatgtgggcaatccgaattcttcggtcgcttcgtcgagttgccaggcagcctcatctccatccatcgagcgctcacggtcgtttctggtgtcgaaagtgggggtttcggtgtcttttcctgtctcaaaagagtggtaccctctcttttcttcgacttccgatgaacatctcgctttgtttatatccctctgtcgttccaagccgggtgagtatggtggaacttcatctcctgttgggagccctttctcgctgccccactctgagcggccctcacgattgggtagctctgcacgaccttcgaggccgactgtataagtcgtccgactatctgcaccgaccgagtccccacaatcgctttctacgccagagatagagcgaggggtctctgaaactgacacagaatctttgtttcggtgtcgggctgcatgggcagcttcagaagtaaaagcaataccggagccaatgagtctggcgagtcctttacccatggttgtggtggtggatggcgtgagtcgtaaatagatttgaatgaaggaatattttccaaagaccgctggggttccgaaggaagatcgttcgaagggtttatgtagagggaggaagactctcatccgcccatcatccggcctctatctatctgtacagtcagatcatttctatatccgggaattaggatgttagctcgaaggacagcaggagggatccgcgtctcccaactaaggcaaccaaaacggtccactttcacgacttctccctgatgacatgtgccattattctgtccattccagccttgtctcgcccagaaagcttatcctttcgagatcaaagcgtcgattgaacccatagatgactgtttattggccgagcatctcacatacctgaagtggactagcgctgtcgggaggtagcggatccagctggccggagctcagccaatcatagccctgagcctacctgactttgctatgtatgtctggactcttcaggcggggagctccttctctcggatacaccatgtggtatacaaagtgtgtcgaaaagcccgctatttacgctttcactgagattctaaacttcggaggtattgcgacgctcaacactactggcaatgtcgtggacctgttaggacagaatatcccatctcacgagcaacggttagtaacaataacgaacaccctaccatttcatgctccacaaatctaactatttctttagtgccttctagcttacagttttgttccataatctggatgccaatgtctacatggggatttccaagatctgggagatgagcgtgagcaaaatcgcgaatgtggacagcatattcgtggagttctttgttcaacctcatcccgtcactaacggcaccaacatgttcggcctgacgcccgaaaggacagacaacgtcatgattgacatgactgctggctatgcaaacaaagcagacgatgtgctagtcgaacgagtgatttaggacattatgaacaagcaacgcgcactcttaaagtctcatcggcatctgatagacttcatctacctcacttacgccgatatctgatagaaggtcctctcgagctggggtgaggataacattgctaagctcagagctgccaccaaggaatacgaccccaatggcgtgtttcaggaacaggtccctggtggttacaaacttccagcgcaggtcttctgattgctctacggcgaatataaaaagatgggcgcgctctgtcgcacatgagctaagcccaggagcaagaacctactcacatctgataagtcagggctaaaggtataatataagcctttacttatcgaaaagaggagatttcagagtttacaagaagggatgatatgaatgaccggtttggaagcgatatgttgagggaattattctctaaagagatatgtgctgatggatttatggcatgttgttgaattggtagattctccactgcttgccatgtttccggagatggatgatattcacaaggtgagatgtgctggcatcatggctctggcgctttgtggaatgccaagaacatttccacaacacaagagttaatatgtgttcgttgtgtttcgtgtaaaaaaatgggttatatccttatgtcaaatgttcttatctttgaagttctggtgttcacgccaagccgtagttaaatcattctgagccgcttcgaccgcctttgacagatgtcccactagtcggtcatgtgcgattgctggcaatccagtagaaggggcgttggcattggcattggcattggcatctggtgagtgtgacgtaccagtctacttggtacgagccgagaacagagaagtgctaacagaaccggattctgaggacgaagagcgcatccgcattgtagcatgcggcagactgacattccagcatctttgttgtctttaaggacagaccccgacatacatgctggttcaggaccactggcactctggcctccgctgctgcgacgatttctgagagaaagcaactgttttcgcgaatgtggagtaagcggagatttagggtcgcagtgataatgcaaggggggcggcattcagcgagacaagcatatgtcatcgttgtaggcggcggtattgttaggttaaatcccagtgagccctcggagccaaaaggcggagtagagagagatgaagagtggctatagttgtaagcggacagaagattcggaagcgtagagtaatccaacatcggctcatcagaatcatcagagccaagggcatagtccatgcagaaatcagagtttgtaatgggaccagattctgcacatgattccaggggcgggcttacaaggagagaatgcagattggcagtagagctatgatcaatgttcaagtgaacatcagcagcctcgaatggcggttctccgaatagactgttgtttgcagcgaatcctgcgggtggatttagcggatcgctaggttcagtaaatcggggtatagttgaaagccgatcatcgtcattgctgggaagcagcaccgggaaaggccccgaatccttgccgaagtgtatatccaaagaacccagcggttccaaagatgtgtgatcgaaatcgcgagtcttatccgtgagcggcgtgacttgacctaaatgccagaataggccatgaagttggtcatttggtcgggcgtgactcgaatgtttaatggagtgccccgagtgacaccgatgacgaggacatgtgcacggtgacctgcccatgcagaaatctccatcgttaatgacaggagtgtacatattggccaaaggccaagaggtcgcaagatcaagatgtctgtactgaaaaccttagaagccaggaagcagaaagaaaaaaaggtagagaagtcttagacaaaggtcacctaatcttagaacattcttccacaggacgccatccattcatctctcaatccacatccctgcaacgagaaagccccaaaaagatgatactaacgattctcaacccgggtgggcactcacttgtatcaggtatagtgcatagcattagtatagcgcgggcaatcttctttggtgctagcccgctcaccagtggagaatagtatttggcccctttaaaattcccaaactgtgttcacgagtcatgtaaatcggtctggggaacgtcgatgaaggttggtaaatggccgataacttataaaggttgtgtttgcctgggtagcaggaggatggtaagcttagtagggtgaaggttggcctagtccctcggttagctttgctggttagctgtgctggtggcttgaaagtgtcgcctgtggctccccgggaggtctgggctcgaagatgcccaggaatgagatcgatgagcgagggatgaaaggccaggaggaagcaatatcaatatgtctgtattggggggaagaaaggaaaaagggagattaaatgacaatgacgaatccccgattcaattaccattaactgcaaaacttgtaatcgtggctgagcaggttgtggtctcccggcgccgttgaggccgctcggcacgatctcccactcgcgctacgttggtttctggtcgcgaattccagttgatcttatccgagctttttcaataacctcagtctatcgtgtggtgagtgtaagtgtaactgacggagccgaaacctttcgcctttgaagcttccgctttccgcgatcacacccatcgtggaatatccaaggaatattattagtttaattcgtgagagaaaaacattcttggggcttggtagccgtatcttgactcttgagcctaaaaaaactcaaaagaacatttgaaaccagcacggcgcttacaaggtacagccctcgactagtacgggtggcatacttagtggcccaaccccgcaccgaaatatcatttcccagtttcgttcacattacttcggtgccttgataccggcaagatgaaaatctctacatgtcttgtgccgttgatgggagtttacggggcagatgcgaaaggtagcttcctccagtctccatctatcgttgccaccaacatcaatcccgcagaagcgatccataccacaaccgttgagtatgatgggaaggacggtatcttgttgccccaagacaaccgcaatggatgggtcaatcctgaagatttggctcctatgccacagtgcatcgcccagcaagatcagtccacctggctgcgtgccatgacgaaatgcaccagcaaacgatgcacctcccactttgcttttatctgcacccaccaccaatggctgactcaactcagctgcctcagcattgcattctcccccgacattatcgaaagttatctcccatactgtggtcgatcggttctcgccaaagcgcagttgtatcaatgggttcatattatcacaggtcgaacgtggcttatcgatgtcggcgacgcgagcggtctgaaaagtctctccccacactccctagctgaagggtatgcagccgttaacgtgattcacaatgcaccaacatgtctgagcgactcggtctccgcttcatcgatggaaccattccgacatgtaatggcctcctgcggtttcacaagcactacccaacacaccggaaacgctgctcgtccctgggagtatagtgaaaggctacgttctatgatcgctctggattttgaaactgttggttacgatctcgttcagcgtcgcatctacgatctggtcctgcatcgcatcggcgatggcgactattttgacaaagattgcttctgcaacaccttcaatatagatctcaacaatgaaccttgttcagggtcaggacaactagacttcacaaaggagcgtctctggatttatgccacgtgtgggtcgacatccttacccgagaactgggcggacacactcaaaaccacccaattcgcgtacattcccatcgaagattggcactggcccaaatgcgtcacggatatgccggagcaagtgattgggctcactgatcagtgtgcaaccgatgcttgtgaggtcggtggctactgcaaaatcaagcgcgcagttgacagggcttgtttttgtcgcaacatcaattatgattcctgcggagggtcgtgccagatatttgagacacgaattgactatatcaagtggctccatgatctttgtggcaatgtgcaggactggcacggtctgccagataattggcgtcaattagccgtcccgactaccctcgacatgattccgtggggttggaaattgaagccatttaacgattcagacattacctataccgcctctttgggagacgcaagggcaaccgaaaaatgtgcctcgaatgagtctaaactcacaagctttgctctagtcaatatagctacttttcttggagtagctctcagccagagaataaggataatacgtcgagtcgcacgccgccttccgtggaacccgcagccgtggccatgggttgtcaagggaacattaatcgccgccctacaactctttgcaaacctgttcaatattcttcttattcaacaaacccctggctatgagaacgttcccgtgatccaattaatgcttctctggagctcaatgcctcggcctacttggctgacgatttctttgattggtgtaccaacctttggagatttgaagttcttcgcggccgggtcttcgctatatgctgaagtgatcctccagtttctatcggcatattacctgcttatgaccgttcattatggtcgaaaacaccatttctactttggaggcatggacggagcggagagggggggacctgcaaaaatgatgtatgccggagcactcgcgtggcttatcatagttagcgtggtgattgctcaggtaatacgggctattaggatgagcaggttgactagacctgttttcgacacaccaaactggcagggaggcaagcagacaacatcgaagattgaggaactgatggaccacttggatgaatgttgcacagggttagtggagagtaggggctcagaagaaacaccgttgatggggagcgagggtagggacccagaagaaacaccgttgataaagagcaaaggaagagatcacacggactatggcacttactctgtgaaaggccacgatggccgggtttccaagaaatcatttgtgggattgtatgcggctacgatcatcagcatgctccttctctggattgcgcaatggctgttttggggtggatttattggtcttagtgcggaagagtacgtattgcactgtcattatttggtctatatcaactaaccgaatataggttctgtttgcctcaacttagggtcctcacggctatctggagtgcattctcattagtaggcgctattattattatttagtcaagtttattgtctacttcgagccctagatctctgaccgtgtttcatgaactatccaaaaaaccggctctcataacaacattactctctgtgtgacatattgttcggccactgggcatagaagatcaacattgcaggattggtcgttgattgatgccggcttccccatctcgagcgcgaataatccatcccagcctggcatattgccccaccatacgcgttttcgtatctccccgtcgaccgcaggccagggaccggagtcgatttgcagctctatctcttgggctacgcgcaccgctgaaccaatccacacctagctggccgactttgagtcggcctcgtagagaaagatgcttgccagcaaagcggcctgagctcgatccagattaaagttgtcatgccagatattgataattccagaagatgtgcgaatgtatttcttgccttcctcttcgctgttcgactcctagaccctagtggaaagtccacgctgtcacgatccacatggattgctatcacataataactaagatccagctacgcagtcctgtagtttgagtattcgcattttcgctttcgtacactacacaaatgtctcattgcgagtacaaatggtaagagccccaccaatcatatatccccgagcactaacatacaggaagattattggaagaataataccaatttcccaacgtaagataggttttgcctccctttaatctttttcaaaagcgtctaagcgactgacagtatcctgacgcgccacagtggcctccgcatcgatttgtggctgtgatggtggctttttcagccgcagccagatcagatacttgtcccatctaccaaagcgctgctgagcagctattgtttcgaagatccagtatagcacggttgtaaccgttacttacaatagagcttgagatccgccaaagaatctgctcaattcgagaaggaaagataaaataccatcctatgaggtgaaaagaagcgaatgccgaggtcaacaaaacagggaggatctttcaaacgttccgatattcgggaatcggtcatttggaaagcgccgcaagggcctttcgcggtcatcaagacatagaccaaagaaccgcatcacatcgtaactacaagtgaaagattgcttggcgataaaatcgtggcggtaaggtagagcggcaagatcaccagcttcaaggagaatctcggtcgtgctaacttccatgctaagcacaattccggtatgtacatcgcttggtttgtgcatccaacaaataaaggttccaaaggtacaaatcacaatagcacccgcgaatagttcaagcgtagtggtcggaagcttaagaatgaagcgaccaaagagttggatcatcagccaagtagcctacgccatgctgagcagtctggcgagcgtatccgtttttgacttgtcccgtatctcgctctgtgtaattcgtgggcattccaaaattgcgggttcaaatgagcaaaactcattcgacttgttgatatatgccatgcatctgaggcccctgagatacaccaccacaacaaatcggccaatgcagcgataaacggagggttattgtctctcgcggagactatttttggccgccaatcgcgacacgtattcggtgtgatgagttccacagtcgcgtgttgcccgcgaacgagacgcttagagatttgagagaaaaagttgcaccccgccaagatcggttcatctctgaaaatatttcggaatcttcctgggcttcctccaaatcaccacacgttcagatgctcgtggaagaccgcaaagatgacccgacgcacgatacgctccgctcgaagactcccaattgttgactgggagcttggcagccacgtccaagccagacaatcagtcataccggccaactattggaagaaaagagctgattccaggatgactgcgtgataatgactatattttggagggccatccaatgcccacatattcttacaaacgattattgcgcctgtggcgttgtttacatatcgaaacaatgaacatctggacccatcttctgggctcaatggccttcattgctgttggatttgaacttaatcacactgtcccgcgttctcaagacctcaatttcgaccgcggcgatgtatttgctttcgggccctttacggcctcggcaaccatctgctttggcctcagctcggcgctggatttcacactctaagaagccactcttacaatatccaccatctctggggcagactggatatcctcggaatctgcttcctcgcccttgaagctggtacatccatgacatattacgcattttattgcagacccttcatccagcgggagtactgggggctcaatcttttttccgctattggcgctgccttcgctttgtttgacaccggcggtggaggtaacaaaatgaggactctgcgaggaggtgtcttctcccagctcgctatctctgccatgttgcctatcctccaaagtgtgattgacttgggttggacgcgtgcgagtaatgaaattggggctgggtggtacctcgcagaagcactctccctcttgactggagtgagtgttttcgtctgtcgattcccagagagactgagccccgggacctttgacatttggggtcattcccatcagctttagcatatgtttgcagtgcttggcggcgcttttcatgttattggtttggtggctgcaggcaactaccgtcggatgcacaaagtctgttgagttaccccgtagcacggtcttcttagactcttgcattggaccattcgtacctgaagtaatgtagaccaagagctgccagcatagaatttttcggtactcctaggtcttcatcgatgtacttcgtcaataatagctcattccggttgtggttgcccaggtgcatgccgatacagtacttccggaaatcggtatcaccactttacacactctttcattgtttgttggactcggatgtgaaatatgagtttctgatctaagccttgtacggtaaaatacaaaactcattctatctcctttccttccttcctcctctctctgtcagtgcgagacagtcaatacatacagtgttttctccatttgattctccatttgactgtccattgtatcgcatctctatcaccggtacggagtagagtgcttacctaatagatagtttgttttacggaagacgcatatacagcggctgaacgcttgggcattgtatattgcttcgactgtgctcttaaaattcggccacgggctcaaagtcccgacatattccatcttgtgaatagcagaagaggtggtcctataagtaccaacgttcaagggaggtagtggggcctgaataatctgtttggcacgcacccgtgttgtggccatagtgctctataccaaactacgagtcagtatgggctgcttactgtgacgtatggatggggatattgcttatgtaggacgtaggatggagggaatgttaggacgcattgtgcagtcgatgttggtcgaggagtcaacgttgctcgaggggttgacgacgaggaatcagcgacaagaagtcaatgctgagagatcaacgttaggggatcaagttcgagtattaggttgttgtcaaggaaggggtgggaaagaaaaatgacagagactccagtttcaagacgtccggtgtaaattccctaagagctctaaggttcaattctcaccccggtgcctaccctgtccttcttctagactgtcacatggtttgcgcccatcgatgtgagctaagcacgcatcctctctaattgattattgacaaaatacatatgaaaatcagcttaaccttctagaattgcagcaaagattggaatcatcgaaattgtgcactttggctaaagcaatggacattcatgttgatcaccaagtccacttagtactgtccttgtcccaaccagccttcctaggtggtatagccaagccccagccgacgaaggtcatatctgtaaatttctcttcggggtcaagggaggcagattctcggaagcctgcaatgtgcctagggatagtcagcctattctgtttagcaccaggtgtacggaagataccacatacatcgtctgtgtagcctcgtcgtatatgatgttctccagcccgggcatacctagctcccatccatatcgtctcaactcccttaggtctgttagctttactctggactggtagaatagggacttataacatactcccagacaacgcggaacttcgcacggacggcctcacgtaatagaccagatgtaggatcccagactttatcctggttcagtgactttccggggaccatatcccacacaatatgtgtaatatatccatctgggaccaggccatcattgccttgttttccttgtttataggcgaggagactcggtaccacgggacactgtcgtagttgcagatccttcaggacgtctagttctcgatgttttcgtgcagcggcctgtcgttgtcgaacctcggggcattcgtactcagttccttcaataggaacctagaaatagattcgcatgaacgccttcttgtcgctgtctgccgcactgtgacagagacatttaaacacagcaaagggaggcccagcgccaccatcaagttcccactttatcatttgttggacatcttcggtcagtttctcctcgataacccacttctggactgatggtgtggcaaaggtaacttctgtacctgtgtaaagttcagagaatccgagaatagacattctgacgaagaaatttaatgagaacgccgataaaagaagcttaggaaaaaaagaagaatgagggaagaaaaattgtgaaatagagttgtgcagagaaaaaggattcaaggcgtaaaaatgatgtgtagttttgtttggcctaaattctcaacctcgtcgatcaggcacttatattccgattactctggggtctttcagacttgaaatagttcaacttcattctgtttacattttgcttggatcatataatctacacagtctctccctatctccttctcctgcatcagtaaaccttctcagataattcgaaactggtcacatgtgttatctgttctctttacctcgggcaaagaccgatacctccggatactgcgaaatgacctcctcaagcggagtcgacgatgctcgacggagcccaaatcccaaaaaagcagtgacagttcggtgaacaatttcgaatgccttggcaccatccaaatttccaaccatcctttgcagggccggtacattttgaacaggaacatccagcagcttcatcagataggacaagtcagcgaatgcgtaatgttgcccctgggcaagttccagctccaacttccaaccccgcagactcgaccagaactctgcccacgatgagtccgttgtctggttttattttcatgtccaaacaggaggaatggaccccgaacaccttgttgaaccaccggcccaaacattgacccgtccaggttcgctccggcaacaacacgacagtccaaacgcatggcttcagcagcagccgcacccccaactgagtgaccgtacatcgcgacctgccgagtcttcagacccgcagcccctgttccagggagtagagctgcgactccagcctttgtgctcagctgatccagcacgaacgacacattccgcgctcgggtgttgacgtccagtgggacctacgcgtcagtgatatttgcggcagtcacgacgcttccgtccggaaactcgaggaactcggcatcatagggatggtcaatagacaccacgatatacccggcgctggcgacggcctgtgcaatggcattgtagaacaggcgggtcgtgccaagagcaggcgagaagatcacaacgggaaactggaggtggcggcctttcggcggctctgggcacgcttggaacgagatggattggatagtcccgttgggaagtcccagcgcgctgtataggtcagagtagtattcggctgttgcggggggcaggtagtttatcttctcgagatcgattttgcagtgggttggggcgaagaccgaagtcatcactgcacgcgatccgttcttgggatcaaacgggtcgactctggtcttttcgatcattttcgccgtgttgtagaacacgtcgtattgtccgggtggactggggagcaccactgcagagatggacatagccacgatgggcaggagacgacaaatgagaagcatgataagccaagataaaccaatagaggaagtcgatgataaaaattgacgataggattccaaagtcaacagtcagagcactgtctgacctttatatatcacggagggaagggggagtggtacacgagcattctgcctgctaacatagcccgtagcaacttctcgccctaccgaggtaactaagtttcccgaataggaatctatagggcgttagttgatcggatgtaaactggtcatcaagtggaatctgaagccatgtagcgccttgtctcgcgatattacttcccaatcaggttagcgccatctggcacatcgttgtctgcccacagcccagacaggtctcgctctaatgtatgcactttcgtgatagtgttcatcaggaatatgcactatttgggagtttgccagagcatctttccagatcatgtcatcatcaacaacgtcgcaggggagaatggtcggccccctagacaagcgaaggcgggtgacgcgctgcctcggctgcgctaaacgatgcatcaaggtctgtggtgtgaaacttgaagttcatgagactagtgcagctaatccttgctagtgtgaagggggaattccatgtgctctctgtattcgacaaaacaccgtgtgcgttgcccagcagcaatcagggcaggatatgactatgtttgtcaacaaaacccagcaaaatgattttagaggaggacacagaagttctgctcagaagggcatggctgttgcaaatagctgcagctccgggggttcgcccacttcactctatcgggagggataaggatacccgcctgcttgattattttgccgcttttattcagcagaacatgttcacgacgagcttctcgtcgatagttccggacctgactcctctgatttcgacttccccggtcctgtacgatgtggtgatagcgattggtactttatatgccaatcgatgtacaggtggacacgcattacagggagagaaatcctcctatgtacatgccatgacctcttatcataagtcaatgggttttttgcggacaagtctgggaaacagcaatgtgatgtaaagagaggatattctctgctacattttttctagggctgtttgaggtaagcgttctatcagaacgagtatcctttatcgaatgcattaaatatgccttttactgacatcaacgtacctagttgctctcagacgacttagactgcccgacgacatctcagagggaatctatagtccataagcgagtcccagagagttgggtcagctcggtcggtcgacgtgcgggctcagccctccgagtagggtactgtcgatcgccagaaataaatgtagattggtagaggtgaacaggtgggccttgtaaggctaaacaagtctgtaggattggatgcggagatggatggtggggaatcggtgtcgatgtcgagaatgggcagttcgtaggcgggcacacgaacttacaatcattattaattatgaactcatcgttcctgatgatcacattaagctatacgaaccatggaagaggacaccgagagcaggcttagggagtaacaatcctccagttgggttttaaagaaaatagttgaatgaacgacgctttctatttctatttgagtctatgcgaagaagttcaaaccttggaatcagcagcaataattgcagctgccttctcggcgactgcaaagacagtagcctgaatatttccccgcggaatcaaagggaagataccagcatcgaccacgcgtaggttttgagtgccgtaaaccttcagtcgagaatccacaacaccacccctttcacgaggcatcatggcagtggagcctactacatggtagtgacaaacgattctctcgcgagctagatcgcgggcggtctcaagagttatgtcgcgagatgagttttgcaggcgccgaccgtcggatttcaagagagaagccataggctcggtccaagcgagagtttccaaccagcgaacatggcgcgcgtgaagctccaaatcaagagggtgtgagaaaaacccgggatcgaatttggggttctctttcgcatctgaggaggcgagatggacagttccgcgagaaaatggtcggttgagcacggcaacgatactaacaaagttctctggctccgtcatgccaaaaattccctttgggcttgggcccttgtcagggagaatttggaaaggtgccagggtgtactgtgcactaggctcagtctcatcctccaacatctgctgcagtagttgatattgggcctttaatcctggtgataggttttggtcttggaggtattcatcaaaaagccttttcagctcaccatctgcaagctccggtagagtcatgtatgcagatgccagtgaacaaagaccgagtggtccagcccctgattgctgccaagccgccatggctgctccagcgatctcgggattccggagagcctctccggtcatctgcccttcggcaacctcccagctgaacggaacaaacccgtgctcctggaggttttctccaacattggagttttcgataatcggttcaattccgtgggaatgaagaagagcggcgtcaccaataccagatagttcgaggagatggggggtcttgatcgcgcccgcagccataataacctctcgcttggcggaaacagatttctgaattccatccttgccggtaaactgcacaccggtggccctggcatcctgtggaccctctttctccaaatgaatcttatgcacaaaagcttcggtgatcaccctcaagttcgatcgcttggcaacttccgagttgtagtacgtcacgccagcatgactacgggttctggtcgtcggatggacagtacctgggttgcagaacgctcccttggcaattcccgacattggatccccgctagtctggtgattgagagtttggaataccttgggccatgcttcaaggaagctagggaacggccccgtaccaaaagagacttggagtgggcctgattcaccctgaacagacggatcgatataatccaatgaaagctgctctttgatctcggcagagggaggggtgaaagtttgcgactttttcaaatattgtgacaccgaatcccagttccaaccgtcgttgccaagtttctcccagcggttgatatcggtttgactagggtaaatagccattccaaggttgattgctgaggatccaccaagtgttcgtccgcggggttcggcaaggcatcgtccattgaggcctttctatcaacaagtcagcgggattgaacagcaccgtgcacgtgaaacgaggcagggtgactgcatacctgaggtgtgctggtgatgcaccagtcaaagtcagggtcaaaataggttgttgctgccagaccaggagcagcaattcgtgggtcatcaactcggtttgctcctgcttcgagaacgagaacgctgcatgagggatcttcggtcaaccgactggctaccaccaagcccgaagtcccgccaccaacaacaacataatcatattcctcgcttaagtcggtaagtaacgaggtatcgatggacgccatgatttccaacgctctgcaggttgaagtgaaaagggatcgagcggtgacacgcgggaagcgcggagatcgcagggaatcaagtcattattcaagactgttcaggcgacaagcttaacagccgagaaaccgtttcgctatccccaattgagatgttcatcccgaagccttactgagaacagaaggacatctgtcgactacgtacatctgttaagttcattgaacatgattattggccattgttaagagactaacctgatcagttcaaaatagcgtgtggtcaatagtacgagaccaacgacaagagaagattttggttgatcagtggagaagagtaggatgaagaacgtatcagaatcgcattgtaatttctgtaatttcggggcaaatatggggtctcccgtgtggcggctggcccccgggttccggaggaacnnnnnnnnnnnnnnnnnnnnnnnnnnnnnnnnnnnnnnnnnnnnnnnnnnnnnnnnnnnnnnnnnnnnnnnnnnnnnnnnnnnnnnnnnnnnnnnnnnnnnnnnnnnnnnnnnnnnnnnnnnnnnnnnnnnnnnnnnnnnnnnnnnnnnnnnnnnnnnnnnnnnnnnnnnnnnnnnnnnnnnnnnnnnnnnnnnnnnnnnnnnnnnnnnnnnnnnnnnnnnnnnnnnnnnnnnnnnnnnnnnnnnnnnnnnnnnnnnnnnnnnnnnnnnnnnnnnnnnnnnnnnnnnnnnnnnnnnnnnnnnnnnnnnnnnncgggagccccccctgccattccgagccgtgtctgcacataccttgcccgctagttacactgtagatcataacaggaaaattacttccttgatagagcgtggcttacgctttatttcttaaacgtcgacccctatcgctctatctatcaatccctactccgtactggtaggaggggatagtaatcctgggaattgtgattcataatgactgtgacatacccgctggatacaccgcttagccgcaatccagttatcgcagtgacggtactaggtgctctggcgacgatcaccaccgcgttgcgattttgggcgctggagatgagacgaatgagtccagaagcgtctgaatatattattttggccgcattagtaggtctgactggaaatttatgatgcaaaaacccttgcagttacaatcaacaggttattgtatatgccgacattgcactcgaatatattcgtatgtttggagatattcccgagctctccgtcttcatcttcaagaaacggtcagagtgactgacacatgaacagttacttgactatggtcgtggaaacggccatcagtacgacgaagaaaaattttggacacggtcgacattgcatcgagctttgccttttcctgcaattggcgggcctctcagccaatcgcccttaggcagtactgagcttgagggtatcgccatatcggggtcagtctgctccgagatccgcagggcagcttcctcgcttatatattcgggataggtgtaacgagcttccattactgcttgatctagccctagacgatgtgccggtttttcggcagaccgagcgaacattgcaaggaatcggtatctcaaccggtaaatgtttgccttactcaacacttcttccttaggtaaaaagtgttagttctattactagctttacagaaccttatatcaagtaccgttattacttataatgtttgcgataaaaagtttgcagaagtcatacactttcagcgccatactaatgattcttactcgactgtgaccggacctctatggcgcgcagtttcccagtaatgcctcgttatattaattttatgcaaagaatatattaaagccttggattcatatagatagaggacctaattagctttcatacgaccggtttcaactccagccacaatgctcatttcgaatcctagcgcagctctgcgatgctctgtcgcgaagagagaactggtttagagtgttgacttcgattacccagatgaaatcattggttatgattttggtacaatgatccaaatgtcctgaagcatcagactatgtgctgcggcaaggagaggactggctctatttttcttgttgaactacctgctttgttgctgagggtggagatgtgataccaatccgtattaggcttagtgccgcagtccttgttacccaccgagggagatcccgcacgggaagatcccagtcaatcacaactggtgaaacaccaataggtgaccaagaagggtaatcatggtgtttccacctggcatcttgtatactgagaaaccgtttaaaaaaattggcagcctagcccgaggccagataccacgtatcttgataagcttggaatcaataacggaattgccaccacaattaccccatacagtacttatattggaattcacgtctccatccccaagtcaccacccgggtttgtcgctcagcgctgaacacactcaaggtattccaaccacctacgagcctttcgttcgcactgatcgatatgttaatgtctcaagccccgatttcaacgccgatcccgagattcgcgcctgtttgagcaacacggttcatgcatgtggatgtgcgaggcatctcccacaagagacgcataaccaaaaggtcttgattccctgtttacgattttatgcgcgcaatttgcctttcccgtaataagactaaccactctcacggaacagtccttctcttctcggatccccacgtagcaaaataaatcagtctcattgacttcagtaatgccagctctctacacacctttctagttcttgagggcgttttctccagtgtgggtacggatgtgaatgtgcaaacaggaacggatcagcagtgagtgcaccatggccttaatatatttcttcaattgaatttgactgtctcgcctaggtgatctgcccggttatatcgaaaacactttcccatgaaccctcccctaatacaatcaatgttgactctatttttgaacgaccgcaggtttaacagttgaattgcatcatcccgggagttggtgggaagcccatggggataaagacagaggtccttccctccctccgaatagtcgggggtgggggctccctggggatcttgcttggacaagcccggcttcccggctcaatgaaaatttgcgagcttatcaccaaagcttgatttgtcacacccatcacagattcccgtcatgagcagagaaaaattcagggctaatgtgtcccgatcggcatattcactttccttgtggatattcggtctttggtttgcgatatatgtgggatttgcttttcaacgcaaagatataggccgtgttgcggtagtcgaatgtacttagggctgttcatatgttttcgatgtcgatattaatcatggcttacatgaaggtagtggaattggcatatatcacttgatgtttgcttcccaaaagcttctgagatctcactgactcggcaagggagttgtttccaatacgaaaacatgccagaagtgtcgctttgaatcacggtaaaaaaccggcttagaccgaattaccctcctgtggataagtaaccagttggctcgcgagaagagatcatggaggcatctcagattttttgaacccatttcatagtaatctgcttcgcttggacaaaagccgtggtatattcgctttccctggtagtgctggtagtgatcgataacgatcagtggcccaggtttgactgcgattggctaacgaaattgtcgaaagtcccacaatgctgtatcacgtcatattaatcaatctcatcgaaccaggtgtgcgctgtctcgcgatgactgtgctgcagtggaagaaagtcagacgagtcctttctcgaatttttctacacattcggccggagaatgcgataacatggcgagcccaactcacctgggcgtgttgaaaactcaatagtggacagtcccacagggtcagcagcgctagatgcgtcggagtttaatcttctgcgaagggaccttggcggcgatgtgtttctttctgccaccgtggggcggtcaccaagagccagagggagcttagaagtcaatggcgtccatgtcggagagattattgccgtccgcgatggcgcggtataatcttgggggggtgttcaacaaaagagggtcgaaatgttactagcgcgcccgaggaatattcagcacccccctctgcctgatgattgtaaggctctcaacgaccttactaagctcatcccctatttattctgcactttctatagtatataaaagtcacactctcaagtactcaattggctatgcccgtactagtccgtactgtaacgaccacgttccagcagtcttcagtacttgattactgatgtaaccttgtgtaattttgtagttacatatgagttgcttacaaagactgcatccatattaactagttttcattggctgatgtaggtaagccacgtgacgtacaggccgacctcccggtcgcgacgccaatcccagcctcctctttgccccctaccctggcccgttatcccctatcacatctttcatcatcacgcggagaaagagtggtgtcgctcaatactgtccttgttgccggtcctgccattcctgtggttacacaggactctctgatttcatcgcttgatctcggattgggcacgtacttgggacttggccgtaggaggctttacttctcttctcccatctcatctctcttcttcaacctcccctataccagtctaggctgctctcaatgtatgaggggccgttgctattaattaaacccatattcgcccaaaatgggcaccaaatcaccaaactctaccctgcagatgaagaaggaagcgcgtgttgatacacccacctccgagacttcttgtgctgttacgcttcgcattggttgtgacaaaattgcgcacaatggattcatctcactttggtttgaagggacactagctaactcacccgataaaccacagaacctggtcctgaatatcatcccaactataattttgacttgtgaatttgcggctgctaccgaaatcagagacacctcaacactgtctttgaaactctccgagcctggcgcggttttcggtcccaccggaacagactctctcaggccttttgatccggacgattcgaagttccactcatttgttgccatctgtaaatccacaatcatttctctcaatttctctcgccaccatttcgagaaagtagaaattacaaagatatcatctatatcgcgctttctacgacaaaaatctgtccagcccaggtgtttcgaacatcaacgacataacttggctccaaaacaccagaaagatttcgaaccgccagccaaactacctccatatcgtgaaaaggatgtgtcccaacaaatcagagaggtgcagcctcccgcctatcgcgagcagcccgttgacgagcaggtgattgacgagcaggtggctggcaagcaggtggttggcaagcggcgcagaggtatgtcctttaacccagctatactccacagtatcattcaatagcttacacatactttccagacacattgtcaaccccgcctgaccatgaaagacggagacggttactccttccatcgcccaaattaagagaccatgccgaggaacccaacacaccgggtgttcttaccgaacccaatacacctagtactcatctctccatatcatcattccgcccaacatgcttcgcacacacatccccggaccacatcgaggacaggaacttcccacaccttgggcaggcactctacaatgctccggatgacctgatttacgataccacgtcgagctctgagatttctccatcacaatctattcgccccacgtttttcacgcatgctccttcccctgttgctttcaagcataaaaagcttctgcatctcagccaggaccccagtcatattcctgatgagccaatttattctattgcacggagctctcatacttctccgtcacggtctcttcgtccaaccagtttcatacgtacttcgtgccccgatcccgccgagcgcaggaagctcgaaagtcttaagcagggaatccgtaatgctcccgacgagctgcttgttcaaattctcaaagagacgaatcgtgggtatctcctcgctttgccaacagacaaggccaacataccgacgcccaagttcgagtttagatccaccaaggccgcaacgctcgacgaacggatagatcgattaatcgatcaaaagtttgataaaaagtttgaagaaagaatggaccactatctcgaatttggcgattcacagtttatcgaaaaattaactgaatgtgccacaagtgagtgtcgtgagcagatctccgatgaattcaagactcgcggggttgagcttgaggaagagctcgaaagttctatattggaggttcgccaggcagttggggacgggctagaggacctcagaaagcaacaagcacagtgtgaacatgatatcaaggatctggaggccgaagtagttgcggctgcggaaacggccgcgaagaacgctgtgtcgaacattttgacacgctcgcacaatacttctaggcagtccttacttggtagcaacttctgcccgctccattggctcggcgccaatacaaggcgaagctctacctagaccgggtactaggcttacatcttggatctttgccgtctcgtatcttctcgcgtagaattccctagtttgcttttatacttgtatgcaggttgctggcctgcgaggacttcgccatgattccgctccacggaaatatccaagccgggcttccacaaagaatgcaggaccctgcacaaacgagcaaacaaggctcagagacatgggcaggcaccaagcgagattctaggggacactggagggcatgagagattcgtagcaacaaaagaagaggatcgccaggagacgaatgaacatatacagggacaaagcgcatcaagatacggtcaccgagggaccggccacatcgtgcaggtgtgggggcctgcaaaatagataagggatcgatcaccataccataccttctcaaagccaagaacgatctcacggtaactccaatcccgatcaataaagtaacctgcgatcgccataaacgcttgtacgaaggttgatgtcctgcagtcaagtgcgacggatattttttcatttggaggtaaggtagaaaggatagtatgatactcctcatcaactaatttcttgagtagacgttgagcagttcgaggatgtagtaatattggtttgtgtggagccatctgggccatcttaatatagccaagtaaatattctcggctaaggatccggaatggtagattcaatgcagtgagacattcaatatattatctctcccattgatcttgtgagaatgtagtcgtctgggcggcattaggttccagacagtactaatgttacatattgaaaataggaaaatagatcaaattacatacagctgcatgttccatagtctgttttatagactgttatctttctgggttcaagccaaccttctggcatctagaagaggtaagatggcgtttaattgtattggtgccgctctgttttgtacgtggaggtcggagacatttcctacaagatcgacacttaaccaaacgttacgaagtataatgtgctacttggtctaagcttttccaaacgtctgatatatgtcggttgtcctatcgtagtcgtcattgtgtggctgagtcgccaacccgattagttggtcgccaccagtcaataaaatcggcctttaatacgttatttatcgcattaaaaaggacgtatggcttctggcgaccagggccaacgcgttggaggacaatattggggtcaaatgggctctctatgtaagggatgtccgcttgagagcttggaggaagaaggcttgaaggcccagcagaattgtggctttattgtgacatagtcaaccaatagaccaaagatgatgcaaggaatgatgatatgggcaataaatagacattggaaaggaagagaaagattaccttggacaaatgacaacttgagcaaacggccttgcaacaaaagggctcagtccaccaatcccaaacgtgctaggaatacccctcaacctcatctttcgtcacatgagaaaagataggatggcgcgaagtgccacaattggatctgctctcccatagacgtagcggctggtctagattgtgggttaggcgctgagaaagggctggtcctgagccgctcattcgctattgcatatgtagtagccacctcaaagcactgctctttcactaccttcagccaattatggcatctgttgatagatgccgcagaggcaggtgctatgagcgactgagccattgtacagcactcgaacccccttagacatcgtatttagacatcgtattcacatctcgtaggcagggttccccgctcaaccgacctgtgcaagttcgtcctggtatattcgtgatctaaggtataaatatcgcaggtaatatcgcattttcctggtcttcagtcacttctcaattccaagtcttgagcccagagacacgaaagtctgattgtgcgataaatatcaacctcaacttcttcaatatccctacatactggacctagacgacttctagtattatctacatatatttttcgatcagatcttcccaaggtaagccagtcttcaccagtgaattttagcttaagactaactcaatccgcagataactattcgggagccatttgaaatcaccaattcttgccactggtctttagtatcaaatggtacacccaagaaatcctgggactgcatagatccaaagtataaagactcgattacataccggccccccaaataagattacccagataatagatggttatttatcggccagggaaagggggttaaggaggaaggagtagaggggaatagattcaagggagtgttaagaagtatatcaggtgagtttaatttgactagtagaacagcgtccaaatttagtcaatagactttcgagcagcactgaaaattcccccataaatagtttacctacctaccacactaggataaccattgtagagagagtttcgctcttagtagccacaaatcctaatcaggtagagactgctaattttagagtttagttatttacggggggcgtgagcacctcaaccattttaaacttatcagcgtcggaaaccataatgttttgtgacaactgtagcaactgactgtatacttaagggctgtttaagagggagggccgctggcaaccaatcaatccaccgaaggcagaagcagccacctatcacccttctcttctaccaacttaacactccttttaccagcacagcgtcacagaaatcatatatcttataaatatggaagttattcaaaagaataaggcatttaaagggattaatggcaaaatgaaattttcctctatccaggtttttattcggcaagatggcatattatattccagaaaatagacgaatcgattaaattcgccaaagacagtagatgatctccaggaactcaaggaaattccaaccgaggacaaaggcccagaagcaaaaaccgcctagtcagctatctatatgaaaacagcaagtctcctcacatatatcgatagaaaccttaagaagcaaatcgctcgcgaagtcgaaacatacaaaattctctgtaagaacccccatccgaacatcgcgacctaccatagctataaagatacccgcggtcaagtctctaggctatacttcagacgatatacattaacactacttaaagcagtcaatccttaacgtctaggtaaggtcgctttccttttaagtatacgcgaactagtgaaagcgaatatgaaaagtggcctagaaggaatcttagccgctatcaagcatctttattctttcggacttattcataacgatatcaaccctgcaaacattatacttaacgatattagtacatttattcttatcgatttcaatagctatcgatctatcggagagtcgtttcgcgacaccgaaacgaaaagaacccgccactagcataaccctgctgtcgatatttcgctcgagaaaaacgatcttaacgctttcagagatctacaaatctggttgactagaccggcggatgagaaatttgtttttaaatgaatcgctttctagtaaattgtcaacacccaggtggatcagctagggcgatcattatttcaaatgtgggcaatcatgagtagcgaaaccaatcacaaccactatgctagcaagaacaaaataagtctggtattttcattgtcaattctgaatggcatctagagtgtcgctagtccaaaagaggcaaccagccaccttctagaatcatgccccgtccttctgtgataggtctctacggcggtgtagttgatgtggtacatgtaaccccctttgaatttttgacaccactaactacaggctgattagttagaatagtccagcttgcgggactttaatcttgtatctcatctggttctggccccccgctcacgtgtcaactaatactaaagttcgacaaaatttgtaagtaaaataatattataccaatttatatactagtgtattcctcttaccttttataaccacttgatatcggctattttatagtattaaagcgggtatacagtcggctagttaaatcaaaaatataggttaggattaactatattaataaacttaaattccttaaagtatacccccttatataaattaaagcttttaaactagagataattaaaaatagcttctgagtagccagttcagtgatcaggtacttttaaagctaaatattcgtcttcgaataccaaccctctaagccgggatagcgattaggacccaaaaacgccgtcaaaccatattcaattataaaagcaagctttattaattaaagcattactttatataagatcaagacgccctccgagcttgctcaattcggctattaaccaggctttaaaagcctgccagatgactatataattgtaaaggtatacgttatgcaggtgtacggcctgtcaactgggtaagatacaaagggctttttggagggaatacaatgtattgatgatatgctaagactaattcttgctagtctcggaggggcccctggggggtcctaaactataaggaaatctatctgcctatatttatataacgaaccccttacggatcgatatcgaaatagatgtatgataatatagatattccttcctgagcctatacaggtttacatatatttccctcttatatagacctttatccgttacaattatctccccctccctatgtggatatccttatccgtatataaatagaaacgttaaaggataaaaggataaagaatcggggaggtatcggggagtttctataataaagaaagtaaagtagtggatattattaaagaagataaggtagtatataataatttaaagaga

SEQ ID NO: 21 - DNA, 53928 bp, Penicillium roqueforti
  misc_feature (1304)..(5918): n is a, c, g, or t
  misc_feature (9441)..(14428): n is a, c, g, or t
  misc_feature (21327)..(21571): n is a, c, g, or t
tcgtatgtggtggcggctcgtatgtgaattacgttagttatgggcttgtcattgacggcacagtctcaatttagggtcatgaaagattcaataacaagctaacgttgcttgaccggctcggtatccctttcattgctaatacctcttttactcgtctctctcgctaagtacgtaaaaacattaaagatatcgctgcaaatagttactgccaaatgcacaaggcgtcttaacaggccttaattaagaactatgtcttttggtaattgctaccaagttggtaagtgatagaggctgagaagcctgtagatgtgtcctctacccctgcaatttgctctacgatttatctacttgatctagttgagaggcttatatctgatgcactcgataagttctcctgttggaccggtatataccgggatttgtaccgtactgacatttgtagtatatatcgagactagtagatcagacagttcctatactataagagacgtgattcactgacctattcagccagccgatcgaagatcaaagatttggattgactagttaaggtatctactatacgaagacgtctctgctatagtagccgactgagctgatctactatcgtgggtctggttgtatcttaagtttgaagtataactgcttacactgtaggtatataagcccacaaatccttataaatgcgctgacccgaaagacgcggggcaactagatccgtggaagttcgaccacaatataccagggcaagggccacggcttcttgtcgtctcttaatccctggttatgactataattgacagtgaacctttgggagcttaccagagcggccctgataaccctgcactattggtagtactctacgcaaagccatggcatatatactattcctggccccgaataatgcagtatgcctagagtggaaggttgtatattaaaatatccggttaacaatagggtgtggactttcaagtgtgagctctgttatgtgaaattatgagacttccattttattctatgctaaggtttatgagatataacgcctactgctgcgccgggtctgattatttgtgctaagccttgtaggctaaaccacgaacaacactgacgtcttgataccactaaaggaccaacttatcgcgcctatgatgatcactgtggcccggtgtgatactgaattgacctctgctgtgtctctataagtatcagccccagctctttatatcttttcttattgtaaaagaaataacccaagagttgagacttcatcggccagtatggcgggccccgccccctaactaccnnnnnnnnnnnnnnnnnnnnnnnnnnnnnnnnnnnnnnnnnnnnnnnnnnnnnnnnnnnnnnnnnnnnnnnnnnnnnnnnnnnnnnnnnnnnnnnnnnnnnnnnnnnnnnnnnnnnnnnnnnnnnnnnnnnnnnnnnnnnnnnnnnnnnnnnnnnnnnnnnnnnnnnnnnnnnnnnnnnnnnnnnnnnnnnnnnnnnnnnnnnnnnnnnnnnnnnnnnnnnnnnnnnnnnnnnnnnnnnnnnnnnnnnnnnnnnnnnnnnnnnnnnnnnnnnnnnnnnnnnnnnnnnnnnnnnnnnnnnnnnnnnnnnnnnnnnnnnnnnnnnnnnnnnnnnnnnnnnnnnnnnnnnnnnnnnnnnnnnnnnnnnnnnnnnnnnnnnnnnnnnnnnnnnnnnnnnnnnnnnnnnnnnnnnnnnnnnnnnnnnnnnnnnnnnnnnnnnnnnnnnnnnnnnnnnnnnnnnnnnnnnnnnnnnnnnnnnnnnnnnnnnnnnnnnnnnnnnnnnnnnnnnnnnnnnnnnnnnnnnnnnnnnnnnnnnnnnnnnnnnnnnnnnnnnnnnnnnnnnnnnnnnnnnnnnnnnnnnnnnnnnnnnnnnnnnnnnnnnnnnnnnnnnnnnnnnnnnnnnnnnnnnnnnnnnnnnnnnnnnnnnnnnnnnnnnnnnnnnnnnnnnnnnnnnnnnnnnnnnnnnnnnnnnnnnnnnnnnnnnnnnnnnnnnnnnnnnnnnnnnnnnnnnnnnnnnnnnnnnnnnnnnnnnnnnnnnnnnnnnnnnnnnnnnnnnnnnnnnnnnnnnnnnnnnnnnnnnnnnnnnnnnnnnnnnnnnnnnnnnnnnnnnnnnnnnnnnnnnnnnnnnnnnnnnnnnnnnnnnnnnnnnnnnnnnnnnnnnnnnnnnnnnnnnnnnnnnnnnnnnnnnnnnnnnnnnnnnnnnnnnnnnnnnnnnnnnnnnnnnnnnnnnnnnnnnnnnnnnnnnnnnnnnnnnnnnnnnnnnnnnnnnnnnnnnnnnnnnnnnnnnnnnnnnnnnnnnnnnnnnnnnnnnnnnnnnnnnnnnnnnnnnnnnnnnnnnnnnnnnnnnnnnnnnnnnnnnnnnnnnnnnnnnnnnnnnnnnnnnnnnnnnnnnnnnnnnnnnnnnnnnnnnnnnnnnnnnnnnnnnnnnnnnnnnnnnnnnnnnnnnnnnnnnnnnnnnnnnnnnnnnnnnnnnnnnnnnnnnnnnnnnnnnnnnnnnnnnnnnnnnnnnnnnnnnnnnnnnnnnnnnnnnnnnnnnnnnnnnnnnnnnnnnnnnnnnnnnnnnnnnnnnnnnnnnnnnnnnnnnnnnnnnnnnnnnnnnnnnnnnnnnnnnnnnnnnnnnnnnnnnnnnnnnnnnnnnnnnnnnnnnnnnnnnnnnnnnnnnnnnnnnnnnnnnnnnnnnnnnnnnnnnnnnnnnnnnnnnnnnnnnnnnnnnnnnnnnnnnnnnnnnnnnnnnnnnnnnnnnnnnnnnnnnnnnnnnnnnnnnnnnnnnnnnnnnnnnnnnnnnnnnnnnnnnnnnnnnnnnnnnnnnnnnnnnnnnnnnnnnnnnnnnnnnnnnnnnnnnnnnnnnnnnnnnnnnnnnnnnnnnnnnnnnnnnnnnnnnnnnnnnnnnnnnnnnnnnnnnnnnnnnnnnnnnnnnnnnnnnnnnnnnnnnnnnnnnnnnnnnnnnnnnnnnnnnnnnnnnnnnnnnnnnnnnnnnnnnnnnnnnnnnnnnnnnnnnnnnnnnnnnnnnnnnnnnnnnnnnnnnnnnnnnnnnnnnnnnnnnnnnnnnnnnnnnnnnnnnnnnnnnnnnnnnnnnnnnnnnnnnnnnnnnnnnnnnnnnnnnnnnnnnnnnnnnnnnnnnnnnnnnnnnnnnnnnnnnnnnnnnnnnnnnnnnnnnnnnnnnnnnnnnnnnnnnnnnnnnnnnnnnnnnnnnnnnnnnnnnnnnnnnnnnnnnnnnnnnnnnnnnnnnnnnnnnnnnnnnnnnnnnnnnnnnnnnnnnnnnnnnnnnnnnnnnnnnnnnnnnnnnnnnnnnnnnnnnnnnnnnnnnnnnnnnnnnnnnnnnnnnnnnnnnnnnnnnnnnnnnnnnnnnnnnnnnnnnnnnnnnnnnnnnnnnnnnnnnnnnnnnnnnnnnnnnnnnnnnnnnnnnnnnnnnnnnnnnnnnnnnnnnnnnnnnnnnnnnnnnnnnnnnnnnnnnnnnnnnnnnnnnnnnnnnnnnnnnnnnnnnnnnnnnnnnnnnnnnnnnnnnnnnnnnnnnnnnnnnnnnnnnnnnnnnnnnnnnnnnnnnnnnnnnnnnnnnnnnnnnnnnnnnnnnnnnnnnnnnnnnnnnnnnnnnnnnnnnnnnnnnnnnnnnnnnnnnnnnnnnnnnnnnnnnnnnnnnnnnnnnnnnnnnnnnnnnnnnnnnnnnnnnnnnnnnnnnnnnnnnnnnnnnnnnnnnnnnnnnnnnnnnnnnnnnnnnnnnnnnnnnnnnnnnnnnnnnnnnnnnnnnnnnnnnnnnnnnnnnnnnnnnnnnnnnnnnnnnnnnnnnnnnnnnnnnnnnnnnnnnnnnnnnnnnnnnnnnnnnnnnnnnnnnnnnnnnnnnnnnnnnnnnnnnnnnnnnnnnnnnnnnnnnnnnnnnnnnnnnnnnnnnnnnnnnnnnnnnnnnnnnnnnnnnnnnnnnnnnnnnnnnnnnnnnnnnnnnnnnnnnnnnnnnnnnnnnnnnnnnnnnnnnnnnnnnnnnnnnnnnnnnnnnnnnnnnnnnnnnnnnnnnnnnnnnnnnnnnnnnnnnnnnnnnnnnnnnnnnnnnnnnnnnnnnnnnnnnnnnnnnnnnnnnnnnnnnnnnnnnnnnnnnnnnnnnnnnnnnnnnnnnnnnnnnnnnnnnnnnnnnnnnnnnnnnnnnnnnnnnnnnnnnnnnnnnnnnnnnnnnnnnnnnnnnnnnnnnnnnnnnnnnnnnnnnnnnnnnnnnnnnnnnnnnnnnnnnnnnnnnnnnnnnnnnnnnnnnnnnnnnnnnnnnnnnnnnnnnnnnnnnnnnnnnnnnnnnnnnnnnnnnnnnnnnnnnnnnnnnnnnnnnnnnnnnnnnnnnnnnnnnnnnnnnnnnnnnnnnnnnnnnnnnnnnnnnnnnnnnnnnnnnnnnnnnnnnnnnnnnnnnnnnnnnnnnnnnnnnnnnnnnnnnnnnnnnnnnnnnnnnnnnnnnnnnnnnnnnnnnnnnnnnnnnnnnnnnnnnnnnnnnnnnnnnnnnnnnnnnnnnnnnnnnnnnnnnnnnnnnnnnnnnnnnnnnnnnnnnnnnnnnnnnnnnnnnnnnnnnnnnnnnnnnnnnnnnnnnnnnnnnnnnnnnnnnnnnnnnnnnnnnnnnnnnnnnnnnnnnnnnnnnnnnnnnnnnnnnnnnnnnnnnnnnnnnnnnnnnnnnnnnnnnnnnnnnnnnnnnnnnnnnnnnnnnnnnnnnnnnnnnnnnnnnnnnnnnnnnnnnnnnnnnnnnnnnnnnnnnnnnnnnnnnnnnnnnnnnnnnnnnnnnnnnnnnnnnnnnnnnnnnnnnnnnnnnnnnnnnnnnnnnnnnnnnnnnnnnnnnnnnnnnnnnnnnnnnnnnnnnnnnnnnnnnnnnnnnnnnnnnnnnnnnnnnnnnnnnnnnnnnnnnnnnnnnnnnnnnnnnnnnnnnnnnnnnnnnnnnnnnnnnnnnnnnnnnnnnnnnnnnnnnnnnnnnnnnnnnnnnnnnnnnnnnnnnnnnnnnnnnnnnnnnnnnnnnnnnnnnnnnnnnnnnnnnnnnnnnnnnnnnnnnnnnnnnnnnnnnnnnnnnnnnnnnnnnnnnnnnnnnnnnnnnnnnnnnnnnnnnnnnnnnnnnnnnnnnnnnnnnnnnnnnnnnnnnnnnnnnnnnnnnnnnnnnnnnnnnnnnnnnnnnnnnnnnnnnnnnnnnnnnnnnnnnnnnnnnnnnnnnnnnnnnnnnnnnnnnnnnnnnnnnnnnnnnnnnnnnnnnnnnnnnnnnnnnnnnnnnnnnnnnnnnnnnnnnnnnnnnnnnnnnnnnnnnnnnnnnnnnnnnnnnnnnnnnnnnnnnnnnnnnnnnnnnnnnnnnnnnnnnnnnnnnnnnnnnnnnnnnnnnnnnnnnnnnnnnnnnnnnnnnnnnnnnnnnnnnnnnnnnnnnnnnnnnnnnnnnnnnnnnnnnnnnnnnnnnnnnnnnnnnnnnnnnnnnnnnnnnnnnnnnnnnnnnnnnnnnnnnnnnnnnnnnnnnnnnnnnnnnnnnnnnnnnnnnnnnnnnnnnnnnnnnnnnnnnnnnnnnnnnnnnnnnnnnnnnnnnnnnnnnnnnnnnnnnnnnnnnnnnnnnnnnnnnnnnnnnnnnnnnnnnnnnnnnnnnnnnnnnnnnnnnnnnnnnnnnnnnnnnnnnnnnnnnnnnnnnnnnnnnnnnnnnnnnnnnnnnnnnnnnnnnnnnnnnnnnnnnnnnnnnnnnnnnnnnnnnnnnnnnnnnnnnnnnnnnnnnnnnnnnnnnnnnnnnnnnnnnnnnnnnnnnnnnnnnnnnnnnnnnnnnnnnnnnnnnnnnnnnnnnnnnnnnnnnnnnnnnnnnnnnnnnnnnnnnnnnnnnnnnnnnnnnnnnnnnnnnnnnnnnnnnnnnnnnnnnnnnnnnnnnnnnnnnnnnnnnnnnnnnnnnnnnnnnnnnnnnnnnnnnnnnnnnnnnnntgtctttgagataaccgtccgagaggcttctaatagcgattagggtgaaagccgatgcgtatccaagctgtatcagtggttgggctggaaagagaaaagcgattgtgggaagagctgctgtctagaccaggaataaaccactaaaccatatggaatcttgctctttcgttacttttgtcttctggaatatactgaagctattttgaaagacaatatctagataccatatggcgcttcctctaccaaacgctatcactgccagagtgtataggattgactgttgagacgaggggaagtggaaaatcaagaataatagtaaataaataacaaagtaggagaatccaagaatgcccacaatgataccgatggcatagttgcgtaggtttcggtaattgagagtgtctattttgcgaagtcaaagtaagtaccggctctctcgagcagtaatccctcgggcgagcatttggctttgtaggcaagagtgggtctcagagtgtccttattgactatgagatgggatgtttatgggggtatatagaggatggcaatgacgctttgcgcgttgttgagggataggacggtgaagcgaggaaccattgtctctgtaataaccacctatcttaatagccggaacctcagaaatgagtatatttatattgggttgccaaaagttcctttttcgccttaccgatattcaacttgaccgaccgaccgaccgactctctgactatgtaattggtatctctcattatgtaaatatagaacctgagagtcgattgtgattctttctctcttctgtgatagtaccatggaggatattgtatagattgtacgttagatcggctaataataagcttataatgcatattaccgcgattgctattcccttttcaagctactctaagagcttacagaacatacgttcaccgaactacaaaggctttataaatccggcaccgagcgctcgactgattttgtctatcaacttctccgaaattttcagaacacaatctgtaacctggttgaaagagcatgtgaagcctaagtggaatgcgaagagctctgcctagtgaatggatcacgtttagcgcgcgttgtcttcgagcctattaggagaatgtacaccgacctacaagcctcattgtagggtagaagatgatggtcgaactgctagcctggtatcgtagcctgagtacgactggtcactctactatagtgatatttctagaggaggaatttccttaattctatatatctacgtgaaaactataatatacttggtgtaccacagtagctctctctataagctcatatgcgatgtaggagcccaccaacacaaactcttataggagacacagttatcgagaagttccgatccacacaggatgtgcaccatagaggcgagcaatgtttagctctaccatctgctatcagccttgtatagaatttcctacactcctagccgaatgacgatctacgggttggcaatgcaatagcagaaaagatggaccaatcatacggttgaaccaccaatagaaaataatactgctaaccattacaaggatggctttgacactgtaatactgcaggatgttcttaaccctagaagcaagaagccaaaggagttatcttaaccgagagagattttgcaatcaatgggataactgagaaccatattgtattgcaattcagggaagtacttgtataaaactttaagatatggtacttattcgatgaggacagtgttctggcaaaccagacaagtaaggctagcgcgattttccgcctcaccctatgggcagtagtagataaatgtggccgataaactaccagagattgggagtccacgatacataggtgctgtgagggcaggtagataattgacagtattaactgccggaataggagggcatgtagttacgagtgatcaggctggcgaagtcagatcttcggcccacaatcattcttggataggtttaatgactaagctggtataactactactgtatatagtgtccctcgatatgtaatttgaatctgatagaactttcaaaatgggggagcttgcttttcctatagcttgtgcgttggtaatgcccttcaatatatcgaaagctatcgctacctaagaagtttcttagactgcttgaagtaatatatgccgcgtcgtaatgtagaattattgaaagctagtaccagctttaactcaatcattgtgctattgcttattgtatgaccgatgagataatactttgatatcacttccgcctaaagtagctaaaaataatgtcacgtgtatagggaaggaatttggtcaattaatagagcggttaaccctggaacatccatcctatttctattaactggccccttactccatttctcgagataatgctgaactaataaagacccaattaaatatattcgccctggggataggttatcttgagtcagctcctgtatatataaaatggcatttaatgaaccatttcgagatgatatccgttttttgagctctgcttgtaagaatgacaggtgtgcacgaagacgcgaaatctggtttgaatttcgataaatagcctgactcagtcgtttcaatttgggccatccttgtcttttcagcttttcaattctggttaagatatgacccgtacctaatagatttactaatagtatctgaggtttcttgatagggaacgtaatcttacaatcatcccttcgctgaggcgctaggttagactgtatttgggctaacagattcggtaacacactcgctagatctagattgggacggtgaatcttggatattggtgcctttaacgttcccactggctgcttgacttggctttcgacggcagtgatacgatgagttggggaggtgcccgaaaagagtagaactaataggatcatgcaactgatgtagcatttatcggagatttggtcttacctatctagcgatgcttttatttctaaagctttaccgggattttggctaatcaattgatgaacggaagtcatgacctggccggtacggatatcgtatgaaccgacttgtgtcgtgagtgtgttgaagctgaagtctaatgtgatgtatggtaggtgtcctgaccttactgtgtgggactagtaatgttaaatagttattgaatgtggtattagaattgaacgatgctatgaattctagtatattataatgcggccgcggtcaccgttattaatctttgaggcttggccatttgtatcgctatcggcatcaataagagtaggattatgctggtaggtagtagaattggagatggtggagcctcattatgagaatggcaatgtttgtaccacgccagctccaaattagacaacgtagcgtagcatacatgtttaaagaacgactgtcatgagattgaatccactgtgatcatttttaccaccttcaccacctttaccacttcaccaccttcaccaccttcaccacttcaccaccttcaccaccttcaccaccttcaccaccttcaccaccttcaccacnnnnnnnnnnnnnnnnnnnnnnnnnnnnnnnnnnnnnnnnnnnnnnnnnnnnnnnnnnnnnnnnnnnnnnnnnnnnnnnnnnnnnnnnnnnnnnnnnnnnnnnnnnnnnnnnnnnnnnnnnnnnnnnnnnnnnnnnnnnnnnnnnnnnnnnnnnnnnnnnnnnnnnnnnnnnnnnnnnnnnnnnnnnnnnnnnnnnnnnnnnnnnnnnnnnnnnnnnnnnnnnnnnnnnnnnnnnnnnnnnnnnnnnnnnnnnnnnnnnnnnnnnnnnnnnnnnnnnnnnnnnnnnnnnnnnnnnnnnnnnnnnnnnnnnnnnnnnnnnnnnnnnnnnnnnnnnnnnnnnnnnnnnnnnnnnnnnnnnnnnnnnnnnnnnnnnnnnnnnnnnnnnnnnnnnnnnnnnnnnnnnnnnnnnnnnnnnnnnnnnnnnnnnnnnnnnnnnnnnnnnnnnnnnnnnnnnnnnnnnnnnnnnnnnnnnnnnnnnnnnnnnnnnnnnnnnnnnnnnnnnnnnnnnnnnnnnnnnnnnnnnnnnnnnnnnnnnnnnnnnnnnnnnnnnnnnnnnnnnnnnnnnnnnnnnnnnnnnnnnnnnnnnnnnnnnnnnnnnnnnnnnnnnnnnnnnnnnnnnnnnnnnnnnnnnnnnnnnnnnnnnnnnnnnnnnnnnnnnnnnnnnnnnnnnnnnnnnnnnnnnnnnnnnnnnnnnnnnnnnnnnnnnnnnnnnnnnnnnnnnnnnnnnnnnnnnnnnnnnnnnnnnnnnnnnnnnnnnnnnnnnnnnnnnnnnnnnnnnnnnnnnnnnnnnnnnnnnnnnnnnnnnnnnnnnnnnnnnnnnnnnnnnnnnnnnnnnnnnnnnnnnnnnnnnnnnnnnnnnnnnnnnnnnnnnnnnnnnnnnnnnnnnnnnnnnnnnnnnnnnnnnnnnnnnnnnnnnnnnnnnnnnnnnnnnnnnnnnnnnnnnnnnnnnnnnnnnnnnnnnnnnnnnnnnnnnnnnnnnnnnnnnnnnnnnnnnnnnnnnnnnnnnnnnnnnnnnnnnnnnnnnnnnnnnnnnnnnnnnnnnnnnnnnnnnnnnnnnnnnnnnnnnnnnnnnnnnnnnnnnnnnnnnnnnnnnnnnnnnnnnnnnnnnnnnnnnnnnnnnnnnnnnnnnnnnnnnnnnnnnnnnnnnnnnnnnnnnnnnnnnnnnnnnnnnnnnnnnnnnnnnnnnnnnnnnnnnnnnnnnnnnnnnnnnnnnnnnnnnnnnnnnnnnnnnnnnnnnnnnnnnnnnnnnnnnnnnnnnnnnnnnnnnnnnnnnnnnnnnnnnnnnnnnnnnnnnnnnnnnnnnnnnnnnnnnnnnnnnnnnnnnnnnnnnnnnnnnnnnnnnnnnnnnnnnnnnnnnnnnnnnnnnnnnnnnnnnnnnnnnnnnnnnnnnnnnnnnnnnnnnnnnnnnnnnnnnnnnnnnnnnnnnnnnnnnnnnnnnnnnnnnnnnnnnnnnnnnnnnnnnnnnnnnnnnnnnnnnnnnnnnnnnnnnnnnnnnnnnnnnnnnnnnnnnnnnnnnnnnnnnnnnnnnnnnnnnnnnnnnnnnnnnnnnnnnnnnnnnnnnnnnnnnnnnnnnnnnnnnnnnnnnnnnnnnnnnnnnnnnnnnnnnnnnnnnnnnnnnnnnnnnnnnnnnnnnnnnnnnnnnnnnnnnnnnnnnnnnnnnnnnnnnnnnnnnnnnnnnnnnnnnnnnnnnnnnnnnnnnnnnnnnnnnnnnnnnnnnnnnnnnnnnnnnnnnnnnnnnnnnnnnnnnnnnnnnnnnnnnnnnnnnnnnnnnnnnnnnnnnnnnnnnnnnnnnnnnnnnnnnnnnnnnnnnnnnnnnnnnnnnnnnnnnnnnnnnnnnnnnnnnnnnnnnnnnnnnnnnnnnnnnnnnnnnnnnnnnnnnnnnnnnnnnnnnnnnnnnnnnnnnnnnnnnnnnnnnnnnnnnnnnnnnnnnnnnnnnnnnnnnnnnnnnnnnnnnnnnnnnnnnnnnnnnnnnnnnnnnnnnnnnnnnnnnnnnnnnnnnnnnnnnnnnnnnnnnnnnnnnnnnnnnnnnnnnnnnnnnnnnnnnnnnnnnnnnnnnnnnnnnnnnnnnnnnnnnnnnnnnnnnnnnnnnnnnnnnnnnnnnnnnnnnnnnnnnnnnnnnnnnnnnnnnnnnnnnnnnnnnnnnnnnnnnnnnnnnnnnnnnnnnnnnnnnnnnnnnnnnnnnnnnnnnnnnnnnnnnnnnnnnnnnnnnnnnnnnnnnnnnnnnnnnnnnnnnnnnnnnnnnnnnnnnnnnnnnnnnnnnnnnnnnnnnnnnnnnnnnnnnnnnnnnnnnnnnnnnnnnnnnnnnnnnnnnnnnnnnnnnnnnnnnnnnnnnnnnnnnnnnnnnnnnnnnnnnnnnnnnnnnnnnnnnnnnnnnnnnnnnnnnnnnnnnnnnnnnnnnnnnnnnnnnnnnnnnnnnnnnnnnnnnnnnnnnnnnnnnnnnnnnnnnnnnnnnnnnnnnnnnnnnnnnnnnnnnnnnnnnnnnnnnnnnnnnnnnnnnnnnnnnnnnnnnnnnnnnnnnnnnnnnnnnnnnnnnnnnnnnnnnnnnnnnnnnnnnnnnnnnnnnnnnnnnnnnnnnnnnnnnnnnnnnnnnnnnnnnnnnnnnnnnnnnnnnnnnnnnnnnnnnnnnnnnnnnnnnnnnnnnnnnnnnnnnnnnnnnnnnnnnnnnnnnnnnnnnnnnnnnnnnnnnnnnnnnnnnnnnnnnnnnnnnnnnnnnnnnnnnnnnnnnnnnnnnnnnnnnnnnnnnnnnnnnnnnnnnnnnnnnnnnnnnnnnnnnnnnnnnnnnnnnnnnnnnnnnnnnnnnnnnnnnnnnnnnnnnnnnnnnnnnnnnnnnnnnnnnnnnnnnnnnnnnnnnnnnnnnnnnnnnnnnnnnnnnnnnnnnnnnnnnnnnnnnnnnnnnnnnnnnnnnnnnnnnnnnnnnnnnnnnnnnnnnnnnnnnnnnnnnnnnnnnnnnnnnnnnnnnnnnnnnnnnnnnnnnnnnnnnnnnnnnnnnnnnnnnnnnnnnnnnnnnnnnnnnnnnnnnnnnnnnnnnnnnnnnnnnnnnnnnnnnnnnnnnnnnnnnnnnnnnnnnnnnnnnnnnnnnnnnnnnnnnnnnnnnnnnnnnnnnnnnnnnnnnnnnnnnnnnnnnnnnnnnnnnnnnnnnnnnnnnnnnnnnnnnnnnnnnnnnnnnnnnnnnnnnnnnnnnnnnnnnnnnnnnnnnnnnnnnnnnnnnnnnnnnnnnnnnnnnnnnnnnnnnnnnnnnnnnnnnnnnnnnnnnnnnnnnnnnnnnnnnnnnnnnnnnnnnnnnnnnnnnnnnnnnnnnnnnnnnnnnnnnnnnnnnnnnnnnnnnnnnnnnnnnnnnnnnnnnnnnnnnnnnnnnnnnnnnnnnnnnnnnnnnnnnnnnnnnnnnnnnnnnnnnnnnnnnnnnnnnnnnnnnnnnnnnnnnnnnnnnnnnnnnnnnnnnnnnnnnnnnnnnnnnnnnnnnnnnnnnnnnnnnnnnnnnnnnnnnnnnnnnnnnnnnnnnnnnnnnnnnnnnnnnnnnnnnnnnnnnnnnnnnnnnnnnnnnnnnnnnnnnnnnnnnnnnnnnnnnnnnnnnnnnnnnnnnnnnnnnnnnnnnnnnnnnnnnnnnnnnnnnnnnnnnnnnnnnnnnnnnnnnnnnnnnnnnnnnnnnnnnnnnnnnnnnnnnnnnnnnnnnnnnnnnnnnnnnnnnnnnnnnnnnnnnnnnnnnnnnnnnnnnnnnnnnnnnnnnnnnnnnnnnnnnnnnnnnnnnnnnnnnnnnnnnnnnnnnnnnnnnnnnnnnnnnnnnnnnnnnnnnnnnnnnnnnnnnnnnnnnnnnnnnnnnnnnnnnnnnnnnnnnnnnnnnnnnnnnnnnnnnnnnnnnnnnnnnnnnnnnnnnnnnnnnnnnnnnnnnnnnnnnnnnnnnnnnnnnnnnnnnnnnnnnnnnnnnnnnnnnnnnnnnnnnnnnnnnnnnnnnnnnnnnnnnnnnnnnnnnnnnnnnnnnnnnnnnnnnnnnnnnnnnnnnnnnnnnnnnnnnnnnnnnnnnnnnnnnnnnnnnnnnnnnnnnnnnnnnnnnnnnnnnnnnnnnnnnnnnnnnnnnnnnnnnnnnnnnnnnnnnnnnnnnnnnnnnnnnnnnnnnnnnnnnnnnnnnnnnnnnnnnnnnnnnnnnnnnnnnnnnnnnnnnnnnnnnnnnnnnnnnnnnnnnnnnnnnnnnnnnnnnnnnnnnnnnnnnnnnnnnnnnnnnnnnnnnnnnnnnnnnnnnnnnnnnnnnnnnnnnnnnnnnnnnnnnnnnnnnnnnnnnnnnnnnnnnnnnnnnnnnnnnnnnnnnnnnnnnnnnnnnnnnnnnnnnnnnnnnnnnnnnnnnnnnnnnnnnnnnnnnnnnnnnnnnnnnnnnnnnnnnnnnnnnnnnnnnnnnnnnnnnnnnnnnnnnnnnnnnnnnnnnnnnnnnnnnnnnnnnnnnnnnnnnnnnnnnnnnnnnnnnnnnnnnnnnnnnnnnnnnnnnnnnnnnnnnnnnnnnnnnnnnnnnnnnnnnnnnnnnnnnnnnnnnnnnnnnnnnnnnnnnnnnnnnnnnnnnnnnnnnnnnnnnnnnnnnnnnnnnnnnnnnnnnnnnnnnnnnnnnnnnnnnnnnnnnnnnnnnnnnnnnnnnnnnnnnnnnnnnnnnnnnnnnnnnnnnnnnnnnnnnnnnnnnnnnnnnnnnnnnnnnnnnnnnnnnnnnnnnnnnnnnnnnnnnnnnnnnnnnnnnnnnnnnnnnnnnnnnnnnnnnnnnnnnnnnnnnnnnnnnnnnnnnnnnnnnnnnnnnnnnnnnnnnnnnnnnnnnnnnnnnnnnnnnnnnnnnnnnnnnnnnnnnnnnnnnnnnnnnnnnnnnnnnnnnnnnnnnnnnnnnnnnnnnnnnnnnnnnnnnnnnnnnnnnnnnnnnnnnnnnnnnnnnnnnnnnnnnnnnnnnnnnnnnnnnnnnnnnnnnnnnnnnnnnnnnnnnnnnnnnnnnnnnnnnnnnnnnnnnnnnnnnnnnnnnnnnnctcgcaggcgctatgtcaacaagcgaacttggcggcgagttttatctctagtctttataccgctccctactcgcggtttccggatttttacaaatggggctactatagcattcgtctaggagttataaatatagatagacgatatatatactgcagttcgaaagactacctgatcatacaatttataaggctgctattctgggcatagtaaatatagtctctgtgcgtttaagttcttggtttctatctatcatgtgacttaaatgccgaactgcaacttcacataggttataatcgccgttttttctgccccaaagtaggttctaagaaatgtaccagtcgcttcgacccacgatagcagtaataagatctccgcggtggccattctagatgttggtgatctgcacgtctaaatagagcgtaggcctgctgctcattgaggaattcctgcgctgacttgggaaaaccaccaatcctttcgcgaaaggtgttattggcaatttcaattgagaccctttcattgaggctggtaacacgaaaatcaatatgctttctaaagtatccacaaaactggtaaatgtcgactagatctatgcttcctagatcaagatcctgaccacactggaacctggcgccggggaactcgataagcactcgctgtaagatctcggcaggatttagtcttgaataaagtacggatccctggcaatgaaatgagctattacccgggatgggggttttgtctaactcaaagaaaaacatagccgacgcgagaatggtccttataagctcagctggtactttaaaatctagattggacatcgcttctagcgaatatatatcgtctaattctgggagtgtaccatcgattgcctgatctagtcggagaatatcaggtgctgagatatgaggtaggtaattaagagcttctaaaaacccttgttttccgtccatagatggagaggacattatggcccgaaataaccgaggaagtgtaccctcccgaattcgactgagaaaacccgttgaatcacttggggtagagctggaaaaccctgttccgatagataagagaaggtcgtgtcgtttcgccatgggccagatgatgcctgattctcgcaaagtaatgcctaacggattgtttgcatggaccccactatcctgtaggagactaaatcctggtaagtgttttgtttggaagtagctagaaagtattagtgtgttaggttatatcatgatgcgtggacttataagggtgctgcagcactatatatcgatctgttagagcctaaatgtaagcaaattcgactgcgataattagatagatgtagggggtcgacttacgcatcatataaggaaggattttctctattgtggtgtggagctagaaactgataggcggtgttggtggtacgcgggcttgttcctcggtagttggctaatatgtaggctgtaccattagaggtgtgactcgccacaatagtaattcggtaacctgtggggctagccgtggcaatatcgaacatgtaacgagaggggccaacggctgctttgaagatctgtgagagcctattagaatcataaagaccatctgtgctcaagttgaacgctgcggcaagctaccggatatagcgaggaactgggctctttgatgaacgacgaaaaatgtttcgcgctaggtccgggaatgtattgaaacactgcgcgacagaagattggttgagaataatatcaatcgccgataatgcgcctgaaagatatggactgttagtttattgacgatcataaaaccctcgactagaagtaatacatacctacgctggttctaatgtatagatccaacagagaaccgataggaatgccgatacgcctttctaaagcctgtagaaggcccagttggattaggccacgcactccgccgccatctaaactgagaatcacaggatttttagtcggtggtagttggcgaacagtgacatcggatgtctcgtcgcagataggatattgagcaatcacgaaatggtactccctaagcggacttggctttccgaagatcacgatacaagtatcatatattgcatgtgtgcacgggagtatatgctctgggggtcgacacagacagataaaataagtagtggtggagcgaagaccgccctatcggcgatataagtggtgtaatgactcttttcgaatcgcggtagatgtcttaacggcgcttaactgcgtaaaatggtatacgaagcgggatgaaacgccagtaatacgggatttgagctcattgtcccagatgcttaaacattgcttctcatagagtgcggtaaataccatggtaggcgagaatcctgagtaaattagttttttaattaggccaaggagagtatgagttaagaaatacagtcataccatgtatttgagggggataggcgtctattaagaaggctgaggctataaagtcatccaaatcctcctttgaatagccaacggatgttgtattttgtgtgacctctcgaagataatcacctatagtatcgttcctcggatagtcccttcgggctcttgctaaaagatcgaatggtggtgcatataggagccatttgtggcttggtatacgagtgctctagaatgcgctgagatgagacgctgaaaagcgtcgacaactaaacatttgcttggtctggactatactgagctgtttaacgatcaaagtttgcagtggcttaaaggcgacactgtctaaaagcccgctccgtgaatgtaggtcgagaatggtaactgttctagtgtcggcttgcttctgaagctgttcgcattcttgtgcgaaggattgcgttatatgttggccgctggttaggacaacgactatccgagtgggaccggaaataaattcatctccaatggtcagctgttgacgtggatattggagtaagcttcttgcggattggatatcagaagcggaatcgaggaataaatataaaatctgggtctatggcaaaacaagttgtatcttgacttcttgttgtagtcttatagggggccacttcccttctgtacctgctataggaaagcttcgatgctttgttgttgaatgcttgagccatttcgagtcgcccaagctgtgcttgtggtataaactgctttcagtaaataatatagggctctgtgtatgggcggtcttggtacttagatggagacggatcaatcctgcggggcctttgcgtgtgatgttgttgtatggaaagagagcgcgcaaagccttcatacagcttgaatttctggaaaagtaaagtagcgatagatattgacattttggatcaggtaattcctgtactagatcttctaggcgatttgtatccactaagttctatgtttgattctcattcatgagatcgagctaggcagctattagatatttgggggaatttagataggaaagggtctgctggggtctttatatatggttattgaactaaaagcgataagtagagattctaagaatgattgggctttagataggagatggcctggtcttgtctcgcctcagaatctagatttaaatgaagatttttagcgccagatccgttttacaatgcttatttggaaatgagggctgtttagatcaggtatatattgattcccctgttctgcttccttttggatattataagctagatcgactcttatctactatgaagaacgtgatactcggcacgcctttcagttatgatgtgatttctgctagtgttgggtggaaacaaatgtgctcctatgctgtgactactaaacgctatgttgcatcttactacggattttttatatgactaggtattatgtaactcgtccttctattttttgaaaaattgttcgaaaatgagagttgaagttgatagggtttgacgttaattgcggaagctgaatgcaattgttaactattctgtgggattacgtgtaatctaccatgatctattaaaaatatattgatgtatgagagtctggcggaaatatggtgggctagttcacttgaagtagggccttctgtaataaggaaaaagaaattggagttgaaactgattttgaatattcgaagttccggtggcataaaaccgctaagtactaagcctgatgaaaatctaggttgctagtttataggttaaccattttaagaatcgaaggtattgtacgtgatataattatgaaccaccatattgtcgaatatataatgatgaccgctcagaatatgaaaacaaccggaacgcttgtctgaaagaatgccgccctgccgtttactttggtaaaccctacatttatgcggtggattctgagtacagttagggctgtcacagcagctcatattcctacccatatacaaatcgaacctaccataccggttgaaggatttcgaaatataacataaccactagatggctgaatttatgctatctgctcctatttgtaatcaaaatggttgatgaaagtctatgatgtatgttttgttgttcgacatcctctgcagaatagagctgtagcggtgagtacggttgctgcgattgataaaagggataccttattatataatctagaataagaacagaatggttatgtatactagaacctacattcttttcgatgttatgtggtaaataaagtcacattggcaatcctggtattgtaaccaccgagtattagtatatttgagggggtaattaatcctaaattacaactgcctctctgggtatccaaccttcagatatctagataatgactaccgctgcaatcgcctctgttttaacgaacctacgctttggtcgctcaactgcaagtattccacaacttaactagaatccatgggatactttcgagcctgctgctagatcataagatcggtctttggtatttgcccggcataagatgaacagaggaaagttggtgtatatccaacaacttgaataacagttctctcctaccccaggtttttaagaactgatggaaggaatctcttatccaagcttcttaaaattgctctaagtttaccactataacgcattgtgcacgttaatctgggaactaacggaagtgtcagtgagccacattctagcctctagctgctccattacaaccgatgaactcgttggaattgttaagccagtgtgttaaatacaattgtcttgcaggtacatttgagactaatattgaataggtattagaaggaatccaatatctgcgcgggctcggaagagcactcgccaccctgggcccggaaaccatcctgcttatacgggcgggtgaagtcaggatcagtgaggcacccgatggtatagtctatatcgataaagataggctaaccttctttagtgggagtcgagaatagctgctaaattaatgaattggaaatgaatcctgcgacgacgaaattatgcgctctagctgatgttgtcactaaattgatgttgaagaattgtacgtacaaatgggaaccggaaatttaaaatctgccttgtcagctggaaagtgtctccgttgagcaaatcttgtaggtaagttcattccatcttatgccattcttagctaatatgatagaatgagatttttacccgagggtcatgcgaaggtgagttgaaattattggtcagtgtagccaataagactgcttatcacggtatcaaatattactatgcgcgttgctgaacgaatgacttattggcgtcgacttggctctttccttgaaggtctaccaagctgagaaagatctcgcggccctatctttcatctttgctattcggatataatgtgattagtacttaagtaaagctaagggtggatatttgatagattaagcatggtgctgtcggtggtagtttgcaatgcattttaggactaaatacctagagtaaattcgggatagctgctcgactactctgcagacgctgacttaacttgcgcgccgttttgacgtatcggtattctaggttctttgtaatgtaaggagttttatttgttactggacatgatcataccaactgggtaaaaatacgatcattattttgtagatgtattccctcgctggaacgagactattgagaccagattttgaatcaataagagaggtcatgaatattagactaggattttgcacttcgtgggcgatttcgattcagccagataaatgtgcacactccagtctatatatctcaatgctgcagaacccgatctcacgttccgatatatatgtgagcttaattaccctggtagccatacagacaagccatcgttggaatttcctgtgatagagtcagtatccctgaggtattcgagactaatattgaataggtactagaaggaatgtaatatctgcgcgggctcggaagagcactcgctaccctgggcccggaaaccatcctgcttatacgggcgggtgaagtcaggatcagtgaggcacccgatggtatagtctatatcgataaagataggctaaccttctttagtgggagtcgagaatagctgctaaattaatgaattggaaatgaatcctgcgatgacgaaattatgcgctctagctgatgttgttactaaattgatgttgaagaattgtatgtacgaatgggaaccggaaattcaaaatctgccttgttagctggaaagtgtctccgttgagcaaatcttacaggtaagctcattccatcttatgccattcttagctaatatgatagaatgagatttttacctgagggtcatgcgaaggtgagttgaaattattggttagtgtagctaataagactgcttatcacggtatcaaatattactatgtgtgttgctgaacgaatgacttattggcgtcgacttggctctttccttgaaggtctaccaagctgagaaagatctcgcggccctatcttttatctttnnnnnnnnnnnnnnnnnnnnnnnnnnnnnnnnnnnnnnnnnnnnnnnnnnnnnnnnnnnnnnnnnnnnnnnnnnnnnnnnnnnnnnnnnnnnnnnnnnnnnnnnnnnnnnnnnnnnnnnnnnnnnnnnnnnnnnnnnnnnnnnnnnnnnnnnnnnnnnnnnnnnnnnnnnnnnnnnnnnnnnnnnnnnnnnnnnnnnnnnnnnnnnnnnnnnnnnnnnnnnnnnnnnnnnnnnnnnnnnnnnnnncacgaatattagactaggattttgcacttcgtgggcgatttcgattcagccagataaatgtgcacactccagtctatatatctcaatgctgcagaacccgatctcacgttccgatatatatgtgagcttaattaccctggtagccatacagataagctatcgttggaatttcctgtgatagagtcagtatccctgaggtcgactgtatcggtgatgggaacgggactaaatttaggttcgcccttatacggacgatatttgctgttgctattatgtataacaatacttctaggctaaggaagacgaatgtctacattctgtctagtaaaacagccatccatgttggcgataaacataggagaaaaagtaagcgattgtttgggcgtgtcgtcggtcgattttcccggtgagttattagccatagtgatgggtatgcagtttatgtacctcttaggattgccgatactattgaaccacgtctaggccaacgtttatttgccgaaaatgtaactgcctgcgaaagaaaagattacttcacgagtatcatagtaggagggatgatggccttcttctgttaaatccgactaaattccatgtgataaaaggttataccaggattggctagagcttgatatatctccgaaatgtatataaatcgaaggacgtttaaactcatgatgtaccttataacctaaattggccctaatattacttaccctttattactctatatgaaaacttgaccttctatagacttctactatactttctcctcgtttggaagtgaggtaaatcataattctttgaactttgctgaacagcccccttataattgctctgtcgaccgagtgttgatgcttcacgtataagtgttgtagacctatatgaaaatattaacctatcttattgtaagacacagctgattatattgactaaagcaaaatctaggattaggtatcttaaacgaaaggtatagtaggaattggaaggaaatcgaactccttagtagttattcgtgcttatttagctatataagaattgtttccttcaatctgaaccttccctggtagctacctttgtcttctaggatagtcctttgtaggtagaataacgattctattgctaggctgcgtaggctgaaaataaatggggttatggcgaataatttggaacgacgtgcttcgatgtaaatgatacgaggcttaattcgtcatatattgctttgctctttattggactgtaaatgtgataaccattctatcttaatctgcgagtctcttggtagctatcgtactaacatatcgatgtcgacgatatctactgagcaattatagaaccgtattatctgaagtatgattcaccaattatactgtgtaaaatttttttaaatggagggcttggattaaggtgctgccagctcgtctgatgctagtaagaagcttccttcgtgggatgcttagatgttaagccttggtgagaattgcgatagagttaattctagcctaggtagggtctctgaagagctacttgaaggggtgcttgagtgaccctcggatagtgttcctgaataggaagcatcttcagggagtattatactatcgcttgatatctggcgtagtgctttatggtatccatggatattacctggctgcagtgaatgtcgtggtagctcttcttcggtaatactaggttgaactctgacgtctggtgcggcaagtgatcgtgaagaaaccttgccgaaaatattcctatcgcttggtcggcgttggccctcgggtccacgctgataaacgtaagggttcgtatgtactagcaactgtaggcggttgagtacggaaaactctagtttcaacttgatactgtataccactgtcttgaaactgacttgaacgtagtggagcttgtactccgttaggaggagtagaacgtttaggatcacgacgagaatgttgatataaagtagatggatgatggcgttgcggctgtcgcgactgcggagtgtaatgataatcttgaaagcacgcgctgctttatatatgtagataccgctgataataaaatcttggatgcagaagccggttgattgaacccggtcaaatatcgcagtaggatgggcgaagcgtgtgtcgctgtagttgaggccgaaaaaaaggacggtcattggaatatagaggatgtaagcgttggtaatgatcatctataggacccaccgcaccttcctcgcgtcggagataacgaggtatagacgcgagtagagcaagcacgcgctgctttatatatgtagataccgctgataataaaatcttggatgtagaagccggttgattgaacctggtcaaatatcgcagcaggacgggcgaagcgtgcgtcgctgtggttgaggccgaaaaaaaggacggtcattggaatatggaggatgtaagcgttggtaatgatcatctataggacctaccgcaccttccttgtgtcggagataacgaggtgcagacgcgagtagagtacgacggcttggctggtaaccatggcgtaccatccgatcatgaagggaattgccgtggggaggttggatgcttgagaaatgaaacgggccatggcaggaagcgtatgcacaaggattccctaggatacaacctacatactctagaaatataggccccggtagcgcttgaatgtatcgaatgtgacaatccctatttctaaggcattatacgcgccgatcgagaatatggacacaatctaaacgattgagatattctccataaggatagcccccacttgcgggggtaggctggtcatgactgtatccatgcttactcagggatttccacgagtagaaggaagctggaacttgagaatggaggctatagctagatttatttaagtctgatggaataaagatatatgtatcctggttatgagctcatgatatgaaagctaataaaggctacctgagagcctatgatggtgtctggacttttatcgacttgaaggagtaagctttggagtctatagttctagtatagtgaattggttcggtgggtcggaagtagggtggtctaaactctagagctgcgagccatacgattgatttacgccgttttatgtttaataaaaagcatgtttaacgatatgttcaacgatatgttctagtgcagctagaagaaggacccttggattcaaggtatcggagaaagttaaccttataataagggtgaaaccaagagtgggaccgttgactgttagctaaacactaaaatcaaatggacgaattgttttgatgaactgtggaaacactcggctggggaaaaacgtgattattcatgaatcatttggatttaagctttaacttagaaagcattctatagacttccgccccacttaccttctagattaactgtggttaaatctgacctacagtagcaacctttaggggtgttaaagtatagtcgccataatgtcgtcgacctgttatcggaaatctgtatggtattctaaatcctatacctgctcctaccgcacctatgagggtggccctttcagtaagctaaagtaacacaggacctcttctatccgcacgcaaacagcccgtcacgtcttggatcgtagactgtactaggcctttttaagtccttgctgtttcttctctaggccataaatagaacctccttgatctactgtcccatggattatcgctgagcttttcatcgcagaactgtatgtaccatccttggtccacatttacgggggtattgtttctctgtgctactagtacttcttgtggcctagggccttataaagtatgatagtagcgttgtaatttttacggggtagagttttatgagccttggtagctaaaatggctcatatggttgtctgggaaaccaggccctggtttgggcgacggtggagcttccgagaatctagatcctaactctgttataacaaagtacttctatactaaacagatgatgacctgggcttttggaagtttactgttcaatatgagagtcatatgtagatgtaaatgcaaattttgtaaacgtttatcaaaaaagggcgtagagggcgaggatgactgttattacttaataacgactctattcatagactaatgcgagggcgttaactatgagaggcttagattattttggatagagcgggtattgagataccactgattatatgaatgtagttctgtgtcggccctagttaatccctctataatggatcgccatgttttcctttttcttttcttctattttctttttattttctttttcattttgtgctaatacctaataggcacgatctagatgctagcaacaaagccttggtaagggcgaactgttatttcaccttgtttcagatcttttgattcagtccctacctaagcctttaaaatcggtgctccctaggaggcaactgtactcaaatgtggtttgtccggcgtattatatgaatcagtaattatcccttgaacggacggatctattatggcacataactctaagtcctctgggaatggcgtaggccgtggtgctgccaaagtaaagcctcgtgctggcagatcgtgtactgattcgccttgttctgatcggtcgacggtccctacatctaaggcagaccgtgacccccttaagccggtagccaagctatataaagggctggtatgttactctctatttataaagtcttcttacctgacgatcgtttttagggatattctgtgataaaaagcgcctagatgaaagcttataaggcgatctatcgaaaatgtttggatgtgatggactaggtctaataagagttcgactgagcacttgggaagatggataaagagagagcttatgactcctaggtgattcagcgcctactggccgaaaaggcctagggagcttcggaactatgacaatctattatggtaagagacaaagccttggctgagaacgagaggtttgaaaaagagctcttctagatacagcagcagtaggagtcggcgaacgctactatggaggatcaggtcttatggcacgacattcaggcggtcttatatcagacgtatagcgagctggtatcggcggctactcggggcttgagcacgattgataaaaagacgaaagcttataaggtgacctatcgaaaatgtttggatgtgatggaccaggtctaataagagttcgaccgagcacttgggaagatggataaagagagagcttatgactcctaggtgatttagcgcctactggccgaaaaggcctagggagcttcggaactacgacaatctatcacggtaagagataaggccttggctgagaacgagaggcttgaaaaagagctcttccagatacagtagtagcaggagtcggcgaacgctactatggaggatcaggtcttatggcacgatatttaggcggtcttatatcagacgtatagcgagctggtatcggtggctactcgggtctcgagcacgatcgataatattcagaatcctggaccagtaccctatttgcctgactctgcggtgatgcacggaagttggcctgagcagcacgggtcgcttagagctctaggtcacaataccctacctgggtttcctgcctcgggtgattatccggttacgacctaggagcctgcagctccaggaaaccattatgaatcacttgtgtgaaataccatatatttaggggttaggaacgtgctaaattcattgtggaggaaccgcctagttagtcttatatacctaatctacagagatagctcttggaataagctgctatcttatgatactagcaaaaataaagaggcgaggttgacgttgatcgctgttctgctatataagaaatattgatgtaaatcttttgataattagacttttgctccgcggagcgtagcttgggaggcagagggaaggttctatgggcgtagcggtagggtccatatcccggggagattatacgctgatccggaagcaactgaatctgtttcctcgtgactgtgggctctacctatcatttaataggcgatgtgactctctatttatgaagaaatttactggccgctacggcccttggtatatgaagcttatagctactcggtagataatagaaacccaaacgaccgactaggattctagtatgaaatatagtattttctcgttcacctataaatcgaaactcaattaagtgggctatcttgggtcataagattgggaatactctactaaggctataaaaccgagtctatatatctcaaatcgatccactactggactgtaacgatccagtgggctagggagaggattgtggctaaaatgatccctaagcgtttgaacttctaataactgtaatgatatatctttttgtatctgtttacgactaccactggtgagggggaattcatcttaaggcaatttgcctactattccgccgccatacagttatatatatccttagagcccgagtctgctctagtgagatatggttggtcgtaaagcacaatgtaatcatgatatctcggccaataagggctaatagtaggccctgaaagttaaaattaatcatcatatttgatcctaattactgctgtggccgacgcgttcgcctatttgcatcactctctatagtatcgtccccccctctagccattatcgctagagctgtctcaacacccgctaactgactgcggatatcctttagatcactgcgaatagttgtaatccagccgctctggtcatgtaatagattttgtatagtcctgctactaaatcagctttgttctttctctggtaggtcgtataactgactttgttcggacatctagtctgagtgtcgtaagtagccataccacaaaacattatttctggggaatcgcagcacttactctgcgatacagtggaaggcgattatactgcaatctctagatagatcagcctctcggagtagttcctgctctcctttagatgtggggcctatactgtagatttgcggaggatgttctgagttggtattgtgtaggtcgcttaaagagtcgttctcgtgataagaggactcctctgtggtatcacctgctgtagaccttgacggactctgtgtattctcagacccggaggttgaaatagatagtgtacgttgtaattggcttcgaaagcatttttgattaaaatttgggagttctctcattctatccatatttgcgcctgaatcgcaacgagaaaacgagtgtccctagttacggtcaaatgtcaaatgttaaagaagttgtataggcctttatatacaggctttatagagagttagtttcttaaaccaaaacttacgattggattttgtaacgtccattgttttctgtccgtacttctgactagccgtgtaatttggaatcgattttaaccaatcagtcacgaagggtattcgattctaggggaaggaaacttgctgaaagacaaagtttttgcctccaaagtctgttatattattcgatacccggtggggcttggtccgagaattcgttgctggttttattttaatgtacagtatttatatctaagaacaattctgtaaaagtatgaaattggaaattgcttgttcttagaatttggtatttattctattggtgggagtctgagggattctgtaatacagagtcgatatttcacaagtcagatttaccaaatacactgaccaggggggtctatgagtcatgtcattaagctttgggaggcttctgattaactaacggtactatcttagcttttgaatgggacctagagggagtggggctttaggcttaccttgcctaacgatatgggattcagattgtgcaattggcttcaaatgtctgtttttactactaattaatgtaagcgctgtatccccacagagcgaagttgtctggtcagaatggcgaagttgaatcctctctgcgggcccgatgtatattagaagattataagctgcagtaaaatataagtataggagaggttgtatgtgttacttcacggatgtcaagaaatatgaaaatcaccatcccttgaaattataatactagcgagggaataccaagcttatagtttgataaaatggagtgtcataaaggccgtggaacccgagtgggactattgattaactgtggaaccgtaaatcattttgataacatagtttggataaactaaggaaattcgttctgtgcgagaatacggttattatggatgatcgttatggaaagcttaggcttctgctccactgactttttggtgttactgaaatctgtgcctactgtcttaagagagattacttcatgaaccggggtaggtttaccataatatcggtctacctaaattgtggatattgtacaagactatcactgtatggtggaccgcaaatgggccggcctataaagccgacttctgccatgtcccggagccgatcggtgtcttggcttaatgtaaagggcggaataggattatataagctcacgtggtcttccaaaattggcgtatatcttttccggccgttagctagagttatcagactagcgattaaattggggcatatggaaaggaagtgttaggctcgaagatagcctggttattaggggaaggttagtgtaggagaagatacatactttcgagaacgttctacagagcagatagacagagcagcttaagaggggaacttactctcataagagctaggaggacaccacagatcgggattcagccttctattctatcaccaaagtctgcaccatattccaaatacctgccctagcccaatagcgcctctcaaaaaaatcaagatccattttattcgcaggccatcaagtctaggcttatagatcgcgtctggaaatttgtaaatctttccaattcttcctatagggcacaaataagacctcattaatctactattccgtaggtggccgctaggattttccacctcggaattagactagcattcacattcccacgcgttatttaattagtccgactacttattaggcccaaggtatcatcagagtgcgatagtagcgttacaatctcgcaaggtaggtggcgatcgacgaggaacccaactataggctttaatagctagaatagttcatatggttgtcctggaaaccgggctcggttcctactgttggcttgtaacgaggtctaaactttctatttgttctccgccgaaaaaatagtcatcattctggatttggtagtattttcatagtatctatgccgctaggtagcactcattctagtaaaggcaatattttagactagcataaggtgtattctgggtatcatgctttggtacctcaagcggctgtaggtgtttagttaaagtccccaggaggtaaaggtgaccctagcaggatgtgaggcgctggggcaggtagatatccgaactaatagatcacaggtcgcgataggcaatagctgtaatctagatcaatcgagagacccgtttactcttaaaagtgaccatcacaaccgccttagtgtttttgcaccgggtaatccgaggcctaaaagataactaggccgttacatttggtcgaatcctataccaggccactcgacaggtaatagctgtaatctggatcaatcgagagacccgtttgctcttaaaagtgaccatcacaactgccttggtgtttttgcaccgggtgatccgaggcctaaaagataactaggctgttacggttttggtcgaatcctataccaggccactcgatagggccaggggcttcgattgtaattttattatagggaatttgtacgtcgtttggaaacgccaaatcccctatttacgagtatatttttgtgatttgtcgttttatctgtggtcccctacctgtaaatagcatgtttgcaaacattggttgtggaataagaagaaagtagcaaacggtacaatactttatagcacgattgatatattattcgaatataagggatgtagactctgggatgcaagtataggatgccggctagaggtatctacggagtattgactagctaggcaaagtcaatagaatcggcttagtggtagcaaagattgagatccttggattcccatatcgtcacacttttatcctatggagtgaaaagagtcgctgagttaatgttccccttcctatgaacagcgttgaataacacaaattgctattttctacgttaggctgcgcctatatagatttgttcgcaatgataagacgttgatagatggaaagcccgttgattaaacagacacttgtaaggttgagtttaatacgggcgttttggcctcccacagtcttaaacaaggcattataaccgttaataacccttcttctaactcttgtatactaagtctggctacctagaagcttggtctaatatggtaattattattaaaatagagatagggatgtccagcagctcgtaaagcccaaacagccatcaataccaatcacatttccgattacgtcgaaatattcgtcctaccactgtaaggctctgcggtgatatatgtataaaagagtagcctataagatggaccagcgccagttgaagataaattgtgcttaaaatcggctcgtcgtctgtgatgggcgttttctgggattggaatcaatgttcgaacggtgatctggccgttttgatggatatagaaggacacaagagagaacttgccagaagaacagcctaatatgtagtacctaacagctctatatgaatcgagacaagtatttataaaaatcaatgtagcgctgtctattcgtagtgttaaccttctaaccggataccttatgataaaattgtgcgaatctcttgcgactatctgtaggcggcggtgagcgtcggagatgttatttgggcaaatatacaaacttctcaaccatgtttaaatgacctgggctcatttactgtaattttcctagagattatgtacagaaaatgacggatctagggatagcatcgggggtagtatagctaacggagaaagtgtcgagtggcttgaatatggcagtgcttccgaacgaggtattaatgacaatcggaaataagatgtcatcgctctaacagcagcttgggaggtgatatctaatatatgcccacgtactcggcgtaagttccctatgagcgttttaaccctaggtaggaaaaacatatgcttgcctactctctcgctggttacctgatcgaatcgtgtaagtcggaactctacctagtatacctcatcggagagaagcaatattgatatataaaggaagatgtcgttagctagagtagagaaggacagaggatccggacctgtccagttgaagcccgactggctctcgtgattgggtaggaagaagcattcgactaaaagcggttcttgaggcttatatgccacaggtttcgctggattaggaaaatctagcctaatgttgtgaaatgcggtaaggatttgagctggagtcgatatatagggagacttgtgctagattgcgtgaaggttgagatcgaaattgtaatctagtttgctgtgagcataggcggtagattaaatcaagtggtacgaactattctgactatatttctctatctggccggattgcttgttagggtagattatagggcgtgggaagagggtctgaactggctgtataagggtagctgaaggatatttaaataatatgctagagactgataagtcttctgcgatacggtacagagtttatttcgtttcttaagtaacttataacagaacctaagaaacagtgatgaagccctggtactcaccaggaccaacggacttttactgtcggtcggtaagacgattccacaactatctacgtctacgttaaactcacttattattcttcagccattaacttatgtatttgaattggcactggtgcagatcaacttgttgtttaataatatctaagttcctactaggccgcttgtaatatgcgtgacctctaattaggagagttatctatacctataaaacttttgtggagtatcggagggtactcttgccgctggccaagtagaaaggatactagtaccagagggatgagatatacagtccagcggtaagtagtgagcactctttctctatatccattacaatatcttaaacagtcactcgctactctatacttaggtatatactcaagttagtgtaataaaaacggttaccactccaaactgtcactgtaatttctattccttaacggcatcctagaacgatctaacgttagaatagaccttaagcatgaccacggccagatagcgctccacttcgcagcctttgtaggcagaatagggtttgtgcatctgcttctttctagtggtagtagccctgatctacaggatgacttaggccactcgccatgggattgagcatgtcgcttcaacaggcctgtgatagaaatgatttttttcaaacgatctaacgtctgaggtattttttggttctcaattatcatagcatgctgagctacctctttactaagtagtatcctatgggtctgtagacgctgtcgagttcctcttcgttggaatataattgtgactctttgtcgatctctctggcttctctctcttgtgttgattctttaaggcccggtgaacgatcgtagataaactctaaaaagtatactgtaccctcgatgttttgaggcgtggacattatatatggggctcgaagagattacaaggagacctgggtgtcaaagtgaagaatttaagcttctaaggtttgtactggctaagcacataaaaaaagtaatttaggctttaacatttagtataaataactgatcttgttatcgtgcctaaaagcgaagatagaaataagcaaacctataaccaaagcggggtaaacatatgaccgtttatattgttggctacgggcgctgaaggtaataaggttcaaaattattatttattgttattactataagaacctgcggtagattaatgggattagtcgcgagatagggaggcgtcgttggcatgctagaggatttatgccagatagcgtgaaggttgagatctaaatcgtagtctactaatgtcagcacaaaatggccattgagataacgggtatagacaaattttgctcaagaatttatattcgttgaaagctcgctgtcttaatgcgtcagaaaaaatatagtggtgtataagcagcaattttatgtgggtttggaggaatcgcaagctagaggctgagtagtgattttattcccctcttattatataatatcaggataaactaagggagtatatagctatatatgaagttatcgaacacgttggatgtattaacagccgtgtaccgttggcacccgtcactaaacctaacgaatgtgtaccagcagtataggccttagctaacgctagcgctgatcctgaggagatagcgcaaatagctattagaagattaaatgtcgttgttcctacctatagacgctctactatctggggacttaattaaggctcaggcttaccaacagagtaggcttgaagatcgctcgcttctaaggctgaaataataccgttacaaagagcctgtaccgctcgtttgcggtcctatattactgatgcctgttcattgtagagctgtagaaggatatcgctatcgcttgctagtaagtcatttgacgcttgaagctgtcgctgctcctccttgagtcgtattttctgcgccgatttgacgacgtagcattcctataggcaaaagtataagtcaagcaatttgaggaccggtatagcgcgggaggcattgaggtttaatactttcatgaactctgccgttagggtatcgtgtgttcttactagattctatttggtattagtgggtgttttcattacctgccgggaggggtatgacggacattgggttcgatggttgtgccgtttgaggcttgctgtggatgggtttctaatatgggtctatcttctggagcttgagatactcggcactgtcgtttggctggccgattaattggggaaggcgaagtgggatggtctattttggtcattaagatggattggattaggaattgtgcttgggggtctttatagctgataagtcacgccgaggctgccgttatctctactaacgcttctccgcctaggattgactgtactttcgaaaagccaatgaatagttagcttaactggttatgctggatctcgctagctgcttaccggattcttcaccgatatatgaaaataaaacccttgagtgttgaaaaagattgttgccgaacctatttcctgaagaaaggtagtttgcaagtggacctctgatacattggatatatgtatactaggtatcaagtagagctcgctgaaccgtaacctattaatttgaccgcgatacatttgaaacgaagagatgtaggtatattgtggttgagtataatgttgatactaattgacgttggtaacctaatcttgtattgtgatatggacctaccagaagtaaatttcactagctcttctaggctaccaatctttcttagtgactgtaccaaaagcgtttgatgagtgctataatatgattttgtgttgtataagcctctggatattattgttatttcctggatcctaacgaccgccttaaaactgccatcctcctttcctgtactatgagcacgttgacagtgatatggggaaaattttctcttcgagatttcagaggcttaagcgaaagctctataaattcaaagatgcttttcttcttagtatcagacgattaaaatctctcccaaagatacatgtacctactgccgcttctgaattggaacgtatatgacggtccgccgccctatccccagaggtgcccctaataaagataatagatcataaaaacgagacaaaaagaccttgattggtttggatccactaccgcgaacatccataaagcagcctggaactatactctttttcagttccacaacctggaaggggagtaacagcctgggggtcggtcgtgtaagaacatagggctttcagatggtacttgagtgcgaaacttgtgcatgagggaacttgagggatcatactgtgtggacgagtaactgactttcgttattcgtaaattccacggtttgtactgaagacatgtagtataaaacacaactaaagccgcttgtggtctggagaaggtctggatcctcgattttcacggccctaggccaacctaaatattctaaggaggagtttgtcgctagttttatttctttgcgaggtccctttcggttttcgagaaagccttattggggggcacggctgtgataatattgtagggaatgctagttggccattgatgtactactctagccgaattatgagattccgagtaaatcatggtatcttcggcttggtcttggcgcatatctaatatatccaatatttggctggcctacccttttggccgatagcgatggcgtctgcacttaaagtaaagtaactgctttgcagctaaggcaaactcgtgtgctagtggatacgtggacggagagctctggagcagctgaaagcacagtactctattaatccgggagttaagcggcacggtgtttcgatagtgattcctattatctcctacctatatgtaccgctcacggtgcaagggatcgcctaagacttggcctaatacctattgtagatgagcaggattcctggacatgatgaaaaagtgaagttaaaagtgtctcgggtcaatcgcgaggtttggatgtaatctaccggagaagatacagattgtgagctggtgtatgttaccatggagggaagacaccatatatataatcttcagaaagtgcctagtggacttttcatcttgctctttcgccagtacatgccgtgtagaagaggtttgacttagctagtttcctgactcatcttgttcttggaaagtggtgattattccctgggagctctagtcatattaaagtacattcttcgatgtatcaactgttttaagggagaatttctacgttactagcgatgcgtgatgttagtatagattctatgatgatgctatataaagctggcgagggaactttgcggagatcgcgcgatatcaatacctattcgaattattttctgcctttgctattagcttaatgtcttctatactgcctcggaacctatttgctgtctgcgtgattccttacggtgaccctggccagcgttagatatcgttagcctctaggggacgccctgtattagacagcactgaccggttaccttacgaatacagataagagccgtcagtgcgcccgttaattgtcttctaatagagaacttaccgttattaggaattcatcacctaatgacccttatcagagtcagccgcgttagcggtcagtggggccctaagggagattagtcgagcggagtgaggtgaacagcctgtcgctcggccggactagtaggcgcttatctaccgcctaacctttctacctctataccgcttcgccggtcggctcgactagcttctactcagcgtatgtgatttatattttgcagcggaggtgtgacgaaaatgaaaaattagtgaagcgactgttaatcacttgattctatttgactaagcgctcggtattagggctagtaacagagagcatagctgtgatttaggggtttggcgcagcctttgtaactgtcagaatctgggatgaataccgtcatccttgatatatatataggtcacgtgatttaccaggctggtttgaaaatttgattattaaactctggagtaccgacagcacgcgataatttcacctttgtatgtactagatgtcaatgtacccacaaacggtgtgagtaggttcgctttaattctacatatgtcttagtacgaaaccgagtgtcggtagataaaagtactagtagtattgtacctagcggtggcgaccgaagaaatggagatattgatatcagctaattagagcctgggagcttaagatagggtcctagaattaatatcttaccttctgaggtcgcagaaagcccttataagacatcctcaccagatctgcgtataaatctgcgttatttgatcactcctagggcttggccgtaacgctaggagctgcaattatgattctagtacttgataaaacatgaccttagttccttaagtggatgtataagacccctaagctacgtcaggttcccttgagcttatctagcccctcgaaatctgtaactgtgctcctagaacccttttcaatgcctccgggagcgagagaacgcctaggaccaagatgtgtgttcctagcacagatagaaccacgggcaggaatatgattaatccttgatagtgattatggccagttttataagctacgtatgatttgctggggctatgatatttctacagtcaccgttttgaactctttacaaatactaagtttgatggatatctacgcagagctgatagttggtcgacggccccgctaaatatatctgatgtcttaagtaaaccagctactgaattcaccctatcagctcctagggtcaactgccttttcaaaacttgtattaggtattccgggattggattggtcgctacatccactatgcttcccatcctacccttacagacgtttctatccttgatcttcccctatatgttctcccataagaccagtatataagagttaagcatcttgccagataggctatattagaagcttatccaattcacaactgtaccgtcttcccgttgtatctagtattagtatctctcgagcattcaactttgccttacggcccctattcccgcaatcttcctatcctttctttcaaataaacaaacaatgggttaatactggctggtggtttgtccgtccaaacgcgagtatataatacggctttttggtggaaagttattagagttgcttttttcctcgtgggccaacattctatgtgacttgattgaatacgagtgggctggcacgcggcttatctgtatcggggattacttaaaaccagacgatctccctattacgattcagtaagacggcctctacctgatttccgccgagagtgaagtaacacctaagcctctccgctacgatgttgctgaggagaattttgaattttggtcttatacagaggaaggagcgactttcccggccatggaagaatctgtcgatcctaaagatcgaatcctgaggaacttgactactaatcaatatgtcttggaggctagattgccctgtggaattaccgctggccacatagctctgatgcgtatatgttggttgtctgacagtttaaccagtattacggggggaggatatctggctaagggagactgggctggccataagttcgatattatagatgctgatatactggaaaatgtgaacggagaatgggaggatgtcactgaggatatctgcgatgagatacaggttctgtggtcgagcaattttggacataactgggaaactaaatggagagcttgatacgtcatgagcagggagctatgatatcacttgatgtaaatacccaaggatagaatcttagattatcaaagaaagcatgaatgaggattttggacacccttcctgtgatatacctgtcgaataagtgtggcttatgtggccttcaagtccccgagcttcctaaatcagaacgcttcaattaattgctaactcgattttgctcgtcataactagccgagggaatttatggataaattcttttctggacgccaagagggaaatatgaggctatatatacaataatgagctaagttgattggaaacaataaagccaaacgcagatggtcattttttttgattgcttttaagtaagatacaagttggattagatctaaactctaagctttcagtatgagatctatattagtaacagagacgctgtggcttagagttctggagtaagcttagcagctaagtaaatgaaattttgatctttaaagtgtaccattagaccgttttatctttgtataggtgtcccccaaaggtgttggcagtctcgctttattcttagcttaaaactgggtgccggcagataaaattgtgagtagtattgcacctaactgcggcgactgaacaaatatacctaatctatatactatgatatagtttcatactcggtgcctttttcgatgtctatcaatttgatgcccccccccccccccccccccccccccccccccacccaccttctccggcgccccccccccctaaattattaatatgcgctaaggccttgcggtgggggtagaacagagtgacgaagattatatctgttaagctaatttcgagaacgactgtacttagatatatagttgttgtatactgcatatcgcttcggcgaggggctagtggaaatgatacctactactatttcctgtaaccacctttggcgatgtacgggtggtgaatagtgtcagaaagttgatatcaacgtttacatcaacgttgaatatgaaagctactgaataccaatagtatgtttttttgcccatggaaattatctacttgagctagggtgaaaataagcgagggttagatgggcagggcattaggccgcaactttcagagaaatatagagcatagattctgttcttgactagctctataatcacaggtataggtgcattccggagggagtgataagaatgcgggactcttgcttgatattttgtaaggttaactaatttcagaaatagcctagtgaagtataaatactttccctggtatgagctgggtcaataccggcaccagtgtcagttatttacaatgaagctctttgaaaccctacttgatatttggttaagtatcaaggactttttgacgctagtagatatcgaaaatatcataaatgctggttctatcctctggaaacagatattcaaagacactagttggctggagtttgccttgacatttgacagatgttctctagttcttattggccataacttgagcgcctatcgccctaggaaatcgttaaaccgtctctactttactcttatcacaggtgattatttaggcgatctcagatacaaaaatgaaaggttctttgccgctctttagtatggctggaaatatgatcaaactcgatatgaggtgcacttcccgtctggcatgacgctgaatatttatgatgttattcaatgttatgaaacggtagagctacctttggaaaaagtttttacgaatataaagtaaggagtctactcggaatactgttactataataatccggcgataaaagaacttcggtcttctgatatcgtgaaatgggatcctgactacaaaaaatcgtggacagatgtgcttggtgggtggaatggtcccgcctgtaagggtagggacatcaaatacggttgtaggattacacttttgaactagcatatgaaggaagactactgtctttttctaagtcataagaaaagcaagctatgggcaaagatgatacggagtgtgcgcgattgctcagtgcgttgatttcctatcatagcttacaagggttgtttaatatatgtgatggtaatactaaacggagaattcaactgatgtctataacattactctacctctagaaataaatcaacgcgcgattttttggagtactttatgtttaatataaatctcttgtcgcgatagataaggtatgtccctaataaacctatagggtatagagttttggcgaagagtagattaaggttctcttaataaattttactatttccagtcctgcgaagtaagcttcttagatccaccgtatgtcacgctcgagctgcattctacgccattagctatctaggctataatcagtgatttgcttaagattgtatcgcgaatggattctcggatagaggagggcagttttcgagctactttttgtcgtgcatgttcgtctcttggtggtggagaaggggactaaggtggtaagttgggatagtctcgaatgacgtataatttaacgcttcggtgtattaattagtcttgttagataagttacatttccattgtgacgcatatgaatgatctgcagactagctagattgagactaggtagttttactatcggcttggcgttagggtttggtagaggttctgtgtaaaatgtggaagccagttctaaacctagctgtagccgattacgaagactaaggttgatagatatattactccaatatcggccacggtaggctggctagttagactaagcgataagtatgatttgatttgaatcaggcagttggtaaagagtgggaggtaaaaagatgaagccggtcaatatctccggggcctataaacgttatgtatactctgttcgcgatacccgttttgctgtactcgaagggaccgcattttgccgctgattgaaaattagctaacggttcccgcgagatgaaatcatatattttctatctctttttttgactttgtctttaccaaccagtttacgatgtgtctctaggccacgggataaccgtcactattcggtttatagcggggctgatgaagaaacgagctttgagtgggaatttaactaagtccgctattggaggggaactaatatggctccgatgggtatcttctatgggtggaaaacttatatgcggctggtgttcggtggaattttatgtttaatatggatgttaacgttgattcaaccttctaataccattcaccacgtatatcgccagtaccactaaacgctaatactataaagttaacgaacgaattatgattgaagaacctaaagagttcagagctcctagaagcattaaatagattcagctagtgggatcgttatcgtggctgcacggtgtggctgagttaagggcctgttagaagtgccctcctatttacaagttcccacttataagcatctatgagttgtaagctaggttgctcctgggaatatgctttaaatcagtaggtgggccgagtattatgtggatacggcaactggattaaatcatgcttgatttgactgttggcatatgtagctattgggaccacatactgacgtctatagtccctctaggagtcctaggagctggcctgataacggtaagccgcgaaatcttgactgtggatgtatccttgatggtgactgcttgagctccaaacatttaaaaggccatggttatccttaccgtagatgctctcgtgccctcccttttctctaaccaataatttgccagtgtaatactatcactatcaaagctaactaatcatggaccacaagcggtcacaagtatcagcgaggtccggttcactagatacagaagatcacaatggatgtgtacagcaagctggtaatgttattctagatccccttctagagaaatctatcggctaataaatctatttgtgaaggcaatgaatcggatataggcttttaccaggtttttggccagtttgtcgacgaaaatcgcggccatataagctaggttttacaaccatgtgttgaccagtctactgggtctgtagctatagaggtagctacttctgttactagcccgagggactatatgttgcctcgaagcgctataaaggctgaaatccacgaactgccccctttaaatacgaaaaagagagcagccgcggccttatctctcccacgaaagcgacgctgacattcacactccccctcttaaataccggatagcttgcgactggtataccgaaaaagactcctaagtcttacaaaagttagtaggcaaatggttaacgatacaatttaatacctataaacgctatctgaccacatcttgatctccgacaccattttaccccgggagtgggccactatgtatctcgccacgcagttgctatagagcaggtatcaagagatcatcgcgaaggaggagattgaaatagacgctgtgtctgattttgacttcccactaacatagccagaagaaaagtgccggaagtgtgctgctgtagaagaggagcggctatatgactgagacgcttcctgctcttatcactgtttgaattatattttgatagcatgactatttaaaattaaatgaccaaattgactgctttttaaccaagagccggtatttgagaacctgctaaacttcaaatgtaccagtctatagataaaggacttttaggtgcgagtattggttaagcgatttcctataggtaatattggtcctctcgataagtaaaaatataaatgtgaaagctagctttatcatgatctttaatcatgatcttcaatcaatgtagtagtgatcagagaaatgaaataatatgtgttagataaatcggggatagaaatggtgaagaaatagtattttcgtaaatcgagttgcctcgaatatcttaaaattttcaataagctagctgaatgagtaaaaggtatttccaaagcctaggagcatgccctcatgtcatcccctatgcgtcgatgctaactcagccggcaatacagatcctatgggtagctcttatggcggtagtctagtcttctggcagaagccgttgtccagtatttggactgagcctggctcagaagcctctatcaccccggtcacctctcgtgaggatggttgtcgccaccacaataggagaaatcctattataaataacaacgccaagccccccatgcccacgctaacaccgatccctactttcgcgccagttgaaagtctatgtgtaccagaggataccgctttcgagggcattgttggaatagctggtaatgtggatgaggacgtaatcgacttggactggatatggattcccggtgaagatattttagcgccatgggtggtaaagcgctttccgttaggcataaaactaaaagcgtactcgttggtctgcgtcaagtatttgttattaatgtcgaccttctaatcataagatccataagtcgagatattaatcgaagctatttgcaagatttttagcttgttgttcaaaagtctatggctggagatcacgtacatgtaagaatcttgtaaaacgcgtcgtagtctgggtgctatgtattcacgtacaggttggctttcgtctcgttgagtatataaacgttcgtgtagtaagaatcccagcctgcctattgaatccgcagtgaatcgctagtggaatatttctctttgaagtcttcattgtctctatcgggcctttgctagtgatcttgggcagtttccttatcgcggacaatttcctcactttgagtcagctgtgataccgagatcaagagtagcgagatgcacgctgggccgaccatgaagcacagtagaattggtagcttcctgctattacttcaccttgagggttatgattctgtttgacatttaagacgaaagacctgaggggggaccgaatcttgggaggcctttcctgggagttggaacagcaaagatgtttttaaaaacaacccttgaaaggtatgtggccgatcaccccttgattgataaactggtatgtttgtacgatggatgagaccttacgggttagaccgcctttcctaagacgatagacttattatagcttctatgagcacaatagtatattactcaataggcatgatactgatattgatctttactgctccgacgatgttcttcgacgctagcgaaaagcggaaatcaccttgcctagaccgcgttatcttggctccgcaatgggctagcagtcctttgaatgcatggctatagataactgaagagtatatagccaaagaagcagttattagggttctcggacctgtttgctagtcgagttatagacatcagcccctattctctcgaatttattgtcggctacgatggtaccacgaatataaaaaagataatagtactgaggcataaaaagtggtataatggcgaagagattgatgctaaagagataaaggaaacttccaagtgaagaagattttcgagttgagatgcatgagcatcggaacaatcataaccgattggacgactatatatcgcagtggggaaaactcggaactcctacatttgtggctttatccttcaggcaggaaagacaggaggcctaactaactacttcacaagcgagtgacgcagtcagaaacatatagtaaatgggataaattacaacttgataccccaacaacggtggtctattggggcgtttccatacaggctaatggtttttaggtagcttctagcctcactataaagtttagagaattttttcctggtcagtgatgaggatatatatatctctagcttggagcgatgtaattttcgataccatgatattacagcccattgaatgcctaaaagggcgtttccatacaggttaatggtttttaggtagcttctagcctcactataaagtttagagaacattttcctggtcagtgatgaggatatatatatctctagcttggagcgatgtaattttcgataccatgatattacagcccattgaatgcctaaaaattgatatatatcattttaaattcctatcaacagctatcgaatagatatgaaatcaaacaaggacattgttattgatatataaggttgtagtttatgctatttactacgtgtttctgactgtgtcactcgcttgtgaaatacgttagttaactaactagctgttaagtagacttctagagagggaagagagatcatcacccctggaatgaaagacgagttgcgagatatctgtgcattaggagattacgtgctatggtgtggtctacgtgatccctatgcttgctagctgacgtcttggatggttggtgttgttttgtcgttctcgtcttgcctgcttggtcaggctgcccatcgtgcatatccctcttcaatatataaatttcagccaagtgttgccggaagtttaatataaaggcggaggtcaataaatcttttcaatctggcagacaaaggaccagtgaaccagacgtcgatttggaaggaaaagagaaacgactgatttactaagtcttcgtggagcgttgatcttttaccaggacaagtaatatgaccgccggtcacatgtccgtctcacccggtatccccgttgagaaatccccatctatcatcccacaagaccagcgcttgattattgaaacacggcaggagggagtgtctctcaccacgaagccaatcatctgctctcaaagccgtcgttgagccttctccttgtctttcaggcaaatttgctgaatggtattctcatagacacaggcaagggcccatcaccttgagtgctgtcgcaggtacgcggtgttttttttgtagaactggctctacccgcatcgtaagtagaccagctttgtgggcggtggcttacttcggccacccgattccgtcttctcggtatcggaaacgatgatcttgatgtttatgattgcgtaaattcagagttgttgaggtttggcttcaggaacgaggttgataggtgctagaaacctgagtggacgtccatcaggtgacagctgtccacggaactcgggatcataatgcgggctcgtctcgtcgagggtagcaacataacggttgcgaccaccgcgtctcgtatgggtcttcgtacaatgaactttgaggttgtcgcggcgggaaaacgtacggtgacatccaggtacccagcaaacatagggcttttctttcaagtgaccccttgtgtggcgctcgaggtggtcctgacgcttgaaccccattctgcagccaatgatgttgcattgaaattttcgctcgtgcatatcacattcttggtcctcaacgtccaagttatggccaggttgtcttctataagcatgacagccaagcagtgaatgatcttttatatagttggtggtatcatagagtatctcggagtgcttttgtggctggccaaggaaccaagtagaggagtcgccggttccagaggggatggaacagacttcaagagccgcgccctgacgtgctgtaaaattcaaagactcagaagtagttgtcgaagcagtcggaaacaacaacgcggggttgatagtctgtattatagatatctcagcccccggtactacattgcacgctggggttgactcgagtcgtctcgactcacagagtctcaattgtggcaggcaaagtatagaggtcaactcagggggatgggctgtttgctgagaaagatagacattgggcatgccacggtccctcagcggcattggtgtatgatgatgacaacctagggaacagtggtagacctggactatctcattctctacctggtattcattttgcggggatatagtgtgaaagttatcaagcctccataggctgtggttctggtcgggccggcttggtaggacgtgtaaatcaccatgataaaaaggagtggtagctagggtcgacggcttgatttctgagagctttgggccaccatcctgtatatcaatctcctgtaaaggctgggatagccacggtagaggggggtgtttgtgatgttctcgaaacatactaccgattgaagatatgcgtgttcgatgtatttttaagggacgtggagaagaggagaatggcttgcaaatttattgcgatcgaggaaagcctttagggtcaatttgtacaggaaccagaccgaccacagttgacgatgaacgtgtaaagaacggcaatcctgtatgaattgcttggcattggctccagtctggaaatcatcaatgagcgagtaagatcaatggtgtcggcccgtatctcgtagtccttacaataagagttggttcccctcaacattttaaccagaattgaacgctttgataattgttttgggtgggctgctttcaaatttccggctagcttcgttgactccggtgattcaccgttgagccctctaatagtgatcatattttactcaccagtatatgaccattccctttctaggaatatacccgatctaggacttcagctctattgaatcaaattgtctttcaaagatcaaagggtgctccgccttgaaatcctgtacaacgctcaataactgcagaactcggaccttcttcatataagagccgatccacgtaaaacccccacagtggtaaacaagtctatccggccatatctggagaaaaccttttggtatcattttctcgtgctaggtcgcttttccagaaattaccaaaaagatctacaatacacagctcaagccaatataggttggttctagaaagccaatctcaacactcataaagggtaatcagaggcaagtccggatcttaaagcttatctaagaatgcctccattctcacaacaccgtttactgaccattctgatttcccgcttggccagtcatcatcccaggaaggaaccatctccagtcatcgtcattctgatcctgatgaacagagacacccagttatctatgatgcaccctatgagtacgtgacttgggtattgacttatgtcaaccaccctatacggatggcaggacttatcccttcgaactgtagaccttcggtgatacaaacatggtaatccggaagttcaggttctctgaatggcacggtggtcctccggtatttcagcagtggtcgagctttttttcaatgattatctttttttcaacgataagtatggatgataaaataattgacacaagtttacggggaaaggaaatagtctgagtgaaaaagcaaggtctatacgtctgagattctttgtaatggtgtgctctcagtcttgaaactaagcaacccacaagcatactctgttgataggcgttgatgaggtctcagcgtgatggtccattcttgccaagaagattagcatatggatagttccgctatattcgcttagcgttgattttagatggtaaggttccgtgagttttggtgttggagcagtcaacgtttcacggttgttgatatatccaacactttgtttttcgagatcttatatagcatctggctacaactataagtttgttttcgtgatctatgataaatagactgtctactcagcctctggcattttgcccctcccaccctgcaaaattaatacttcctactcttctgtatcctttaccgcagtttcggcaacgagccttcgacagaaatgaagatggatgaatcggatagagatggtctgtacccgttgtctagtggcgactagtactaacgttaatagcttacgatttagatctcgaccttcacgctgtctggcttgaatcctctggtataccgacaccgcccccctgtcttgctaccgatccgggtgatccacgaccgacttcctcgaataggggtgagccggcagggtgtagtaatcaaagatcttccatgattgaatgtctctttcaccccagtttagacgatctttccggctttaagtggacgggtccagatcctctatccatctctacgcaggccggtgacattttcctccatatgtcagcgttcctttttccgaaagagattcactggatagaacttcgacttgcgaggtttgacgggatatctgacgaaattctgggagagcacctattcttcctgccccgggtcgaaacagtgctgggaaacctcggtcgggtgcgaagagagttactagacactcacctggcttgctgttgatacaacagggataggctttcgattgtctctttggcctcgtctggagcctctaccgtattcgagtcacttgaaactttcttcgctagcggcgctgcccccgacgctatccctagacccaagattctttgtgcacaatatatcgggtagttacaagtgagaccggaccatgcggaatcgttcgtggaccctttctagagaacatatagaagataaattggcggctgttctatatgttttttgttataaacaattgcgataagaggcagaatgctttatatcgagttattttcttctcaatgcgacgtaaattgtactatttctctgtttcaaaatcaaaatgggacaaggaaaccctgaatagacaatccctcactttccttttgcaatgctgacagtaccctagacagtcactcaagagatgacttcagtgcctgctcgaaaagcgcagatggaagaactgcttatcatggaaagctgaaggctatctctattgtgttgcaggtgcatgctatatttcttcatttgtttgttttactccaacatctcgtcatcaaagtttttagatacgcacgactcccataggcatctatagagttcgacaagttgagttgtcaggaatgccaggcttgaaatgtcacgttcgaggtctgctatcaccttcaatattggttgaagaggtgcgttttactcccgcttcctactgtgaggggagagctgcagtggccagcaaacccatatcaagtcgagccgttctgctaatcaatgggtgggtatagtcataagcctcgtgtagggtaaacctgtcactaaaggttgacaattcactaggctgccgatctacttgcaatcccggccgagtgagctaaaggccctaggcaacaccattcgtaataaccctgatagtcttttagaggctatgccggcgccgatggctatctactgaacttgagactacagcaaaagtcaatcattttgactactagaattcctagtcaactactagctgctcattgatgatagcaatagtgaccaagttggtcggagacattcgatcaagtttcacagcgttaagggtcagctctccaggctaagtataaagtcctatatactttgcaggacgctttggtcagtcatcaacggtccttaaatgctcatgtgatagtagtcaatgtgtggacgtaaggctaaacttccacaaggttctcggctcgtaaagtaccaacataaatttgagacagataagcccacggcccaacacagtcagcagtaaggtaaagggaaaggtcatatctatggttcccgagcgagatagtttcaggatttatttggcgactcaacgttggatcggtgacatataagatggagaaatcataattcctaggcatatcgtttaggattgaacggctcccggtggattagagtggctcatgttagatggtcgcgggaatttgtaagccagtcaacgttattttactgattctgcatcagtgaagaaatgattttccagagagctcaatgagaaagcgaatatctgatgggtaacatggcaacaaatcctcccctacgttcgtgatcgttgagcaccccttcgtttaccgcccaaaaaacataaaacttacgtttctgcatactctacaccttggttgtatctttgcttatgctatatcgagagcccataatatataaatgattcagttctccaccggaatgtacccagcagcggtttgtatcagttcttatttctagcttcgataatagtcatactatgatttttcaatccgcaccgtcggtatgagcttagattatagaagaatacatcaagctatgtgcaatatacaacttggctggtatcaaatgcttctgtcctatgttcccttgcggccaaactgtatttcattaaccgcaatctcaacttcctggctgcattgacgtaatgcacgtattcccaaatttgagttgacgactgtgtctcttcacaccgcaaatgggtaggtactggcattgcactgcctatgatagaaagtcagcttgtaaataataacgaagaaggggtctgtggcacctggtctcaaatcttccgtctgagttaagttgttgctatccgtatagcgaggctgggtcattatttcttcttgataacatcggtcaatggtatcctgggttgggcttttgcttggaacagtcgccggtgaagctttcccacccacagagcagcgaatggatcttgggcgtttttgaatgcctaggccatgaggtgtggcgccagcgtgaaggcgcttccgcagaatatggtacattttccctcgtagagattcaacgcttcggtacaccccatgttgtttgtaataggcgtcggcgcgggctttccacgaaagcgcccgataagcatctagccaggggataaggttgctctcctcccattctgaccaaattacttccctacgcgaggccatggcgttcgtagggagtagcaatactttatagatcggttcaaaagagggcaagaaatttggtctcacatggataggaaatgtgagccttgaatagctgtttaaaaataatatggttactgcaatgtgaatttttctaaggattgatttgacccatggatcagtctggtgagcttgttgagcgaatctgagtggtgaaatctcgactcaacagttcagactcgcatcatcaatgtctatctctggttccaacaccgggaaggttctatatcattggtgtctttaaaatgaggttgttgagatttaaactcgtatcggaatcactatactgaagagggaaatgcacgatgggcagcctggccatg

SEQ ID NO: 22 - DNA, 29939 bp, Penicillium roqueforti
  misc_feature (3252)..(4738): n is a, c, g, or t
  misc_feature (11014)..(12231): n is a, c, g, or t
  misc_feature (25939)..(27449): n is a, c, g, or t
ttccttagtatagagagtagtaatttctataatcagtttttagttttcttttatagtatccttatattaaccggcgagggttataaaccattcttcctttaaggttccttagagtatatcgtatattaaattttcttctttaaggttcattatctcgttacactcaatactttctattatagtagggtttaaggtcgaggtactaggagttagggtagctaggcctagctaatcgagatcctctttatatagggctttaagaggtcgctttctatagcttaccgagcttcttatcgaggaagccatatttataatcgaaaaaaggaaaaatcttttaaaaggttagactaagctggaactagtcgtaataaccgcttatatagctatacagtctaaaggttaagttggtttaggtacttagaattatattataagctaatttaatttaaaggaaaagagtgcaattctaaccaaattctaagtataaggaagaaaggaaaaagagaaactatctaagtatatattcttccactaaattagaagctttcctatcttataagtagcttatataagattactaagaaagtaggatattcctattaccttaaactcctagaattaattaaggtatacctaatattctatctaagtaaactctaaagagtagtaattactaaactattacttagataataccctaacctactactactacttaggattagtaaaactaataagtaggaaatcgataagattcttaatactaggatatactatcaaaaactataatactatatttagtagctaagatataacctagacttataatagtaccctataagtaactttaagaatactcctaagaagattaagtagttctataattagtacctgtagaagcctagactactaatatagttataagagtagactaatactataaataaggatagattcttaaataactatattaataataataaacctatatttaggggctaaatatattcttagctaggggttatataataatctaaggaggattatacttactaaatagggtaggggcggtcatatctttatacttactaaataaggcaggaataactatacccttataccttcctaagaagataaacgagaattaagcaagataaacgtaagggtataagaagggaagaacgtgtacttagatagtttctcttttttccttttcttctttatacttagaatttgattggaattgcactcttttcttctgaatcgaattagcttataatagatagagtatcttctcttagagttaacttataagaggaactagtttctctaatctagtcctatttaagtgagtctatatactattatacttctagtatatctatttcttctatattaattctagccttaagtttcttaagtcttttctagaagttagctttcctctttactagcttttctattattattatttattctatctaagggattatattcttactataaatagcctatatctcttcttagattagagtaagagtctagttaactctttatactattagctattctatatttatagaaattagtatctctctctaaagtcttctaaggattaatcttatataccttagtataggaagtagtctctattaataaggtagtaccggagtctctagtataattaaaatactaccttaaattataggtaagtaaattattaatagggttattagatcctatctatagactataataatctctattcttagtttatatctagctatattaattaataggatagaaattttatttatattattatctcttagaggttttaatagctttagtactactattactcctccctcctaattattatcccttagttaaggaaagctaatatctctagagattataattttcctattttctagattctagacttttagaatatatctattatctcccttataatctataagatatcctttctaagatcttagagtagccttatatacctatactctcttctcttttagaatatagatatagatagttattccctatagtctaaggtactttagtaataaatctaggttattaattctaagttctatatactagtatttaagtagtaatatttaagactttagattagttaatctattaataatatagattatagtttctactatataaggctatagctctttaggtagcttagtattaataattattattctctaaatattattaatatatcctccgaaatattctactatactattaggctttactatataaggtagtataactttaaaagttattccctttttagtaccctaggtaataaagttcttaaactctattctactattaagtctctagattctagggtaatacctagtttagagtttaatttttttataaaatacttaaagcttaataaatacttctcctttatttataagagtcggtcccttaagatatcttattatattattaagaataggtatctagtactttttactatttagacccttaggttttataggctatatatctatataaaatttctatactatatcttaaacctaaaattatagttcttaagaaatctatttcttagatttaccttaaaaatatactttatagttaaaatattctattctatactattctttattattaagttcttatacttattttagtattaaagtaagtttagcttttctagtatatctaaggtattaatataccttaaaggtagaaattttattaactaatcctatttcttctttactatctaacttataggataaatcttctttatatatattatcttctttaggactaataaggtatagaactctaagtaatatatttataactctaatagtttttctaatactatctataagtcgctttattcttatattatataagatatcctattcttctaggagtttctatataccaaataatttactataatctcttaggctatagtagccttttattagaaaggtatatacgaaggtgtatagcggccaacagtcggatacctgattttaatggttttatcgcctaattaggactagctcttaccaattttagaccggcaggaaattaaaatacctgaattactatgacagatctcctagtaccaaattgagaacagcttgaaagttgaaacatgaagctattcatacccccccccccccccccccccccccccccccccatctnnnnnnnnnnnnnnnnnnnnnnnnnnnnnnnnnnnnnnnnnnnnnnnnnnnnnnnnnnnnnnnnnnnnnnnnnnnnnnnnnnnnnnnnnnnnnnnnnnnnnnnnnnnnnnnnnnnnnnnnnnnnnnnnnnnnnnnnnnnnnnnnnnnnnnnnnnnnnnnnnnnnnnnnnnnnnnnnnnnnnnnnnnnnnnnnnnnnnnnnnnnnnnnnnnnnnnnnnnnnnnnnnnnnnnnnnnnnnnnnnnnnnnnnnnnnnnnnnnnnnnnnnnnnnnnnnnnnnnnnnnnnnnnnnnnnnnnnnnnnnnnnnnnnnnnnnnnnnnnnnnnnnnnnnnnnnnnnnnnnnnnnnnnnnnnnnnnnnnnnnnnnnnnnnnnnnnnnnnnnnnnnnnnnnnnnnnnnnnnnnnnnnnnnnnnnnnnnnnnnnnnnnnnnnnnnnnnnnnnnnnnnnnnnnnnnnnnnnnnnnnnnnnnnnnnnnnnnnnnnnnnnnnnnnnnnnnnnnnnnnnnnnnnnnnnnnnnnnnnnnnnnnnnnnnnnnnnnnnnnnnnnnnnnnnnnnnnnnnnnnnnnnnnnnnnnnnnnnnnnnnnnnnnnnnnnnnnnnnnnnnnnnnnnnnnnnnnnnnnnnnnnnnnnnnnnnnnnnnnnnnnnnnnnnnnnnnnnnnnnnnnnnnnnnnnnnnnnnnnnnnnnnnnnnnnnnnnnnnnnnnnnnnnnnnnnnnnnnnnnnnnnnnnnnnnnnnnnnnnnnnnnnnnnnnnnnnnnnnnnnnnnnnnnnnnnnnnnnnnnnnnnnnnnnnnnnnnnnnnnnnnnnnnnnnnnnnnnnnnnnnnnnnnnnnnnnnnnnnnnnnnnnnnnnnnnnnnnnnnnnnnnnnnnnnnnnnnnnnnnnnnnnnnnnnnnnnnnnnnnnnnnnnnnnnnnnnnnnnnnnnnnnnnnnnnnnnnnnnnnnnnnnnnnnnnnnnnnnnnnnnnnnnnnnnnnnnnnnnnnnnnnnnnnnnnnnnnnnnnnnnnnnnnnnnnnnnnnnnnnnnnnnnnnnnnnnnnnnnnnnnnnnnnnnnnnnnnnnnnnnnnnnnnnnnnnnnnnnnnnnnnnnnnnnnnnnnnnnnnnnnnnnnnnnnnnnnnnnnnnnnnnnnnnnnnnnnnnnnnnnnnnnnnnnnnnnnnnnnnnnnnnnnnnnnnnnnnnnnnnnnnnnnnnnnnnnnnnnnnnnnnnnnnnnnnnnnnnnnnnnnnnnnnnnnnnnnnnnnnnnnnnnnnnnnnnnnnnnnnnnnnnnnnnnnnnnnnnnnnnnnnnnnnnnnnnnnnnnnnnnnnnnnnnnnnnnnnnnnnnnnnnnnnnnnnnnnnnnnnnnnnnnnnnnnnnnnnnnnnnnnnnnnnnnnnnnnnnnnnnnnnnnnnnnnnnnnnnnnnnnnnnnnnnnnnnnnnnnnnnnnnnnnnnnnnnnnnnnnnnnnnnnnnnnnnnnnnnnnnnnnnnnnnnnnnnnnnnnnnnnnnnnnnttaagtaactatagtctctaataaatatagtatattagttagcctataaacttaggtatttcctatatataaggtctagctaagtagttatttactagtaagagaatatagttaggataaagggggatactatacctatatatacctagggtatatcctgttatatgccaagtcgttcaaggaaagagtgcatttatgtcaaaattctaagcataaggagagaagaagaaaagggaaaactatctacaagggcgttcctccttcttatatccttcctatttgcttatttgcttccagtacaaaagctcgtttacccttcttagaaggaatgagggaagtcgctcctacctagatcgtcatataacccctagctaagaatacatttagtccctaaatacaggctttccgtcattaatgtggtcatccaatattctgtcttcttccgctgccttaatctattcctatagttatattagcagtcctggttttactaggtaggtcttatagaattccttgatcttatctggtatattccggaagttacttactagatactattgtaaatctaggttatatcctagccattaaaccctatactgtaatttccggtagtaagtcctaacgttaaggatcttttctacctcctacttatcagttttactaatttatactagtagcagtaggtctagatactatcctagtaacggctctattattactactttctaaagcttacttagatagaaaattgggtaaaccttaatagattccagaagtttaaggcgataagaatatcctactttctcaataatcttataaggaccacttactaaataggagagctttcgactaggccaatcttactactaatcctttatcgttacaaatatagaattgcctatattaaaatcctcttcttagcgatatttatttacttatcggatctataactactaagactttttaatctgattttttatctctatctaaatatcctaaaggtaggatagtatatctattacttcttgcttattctaggttaaagtctctcagtccttctaatcgaaagatatagtaggttcgtagcctctttcgataaagaatagggacttcttagttatatcctaagggagtattaatactataaaatctactatcggtaggtattctaactaattatcctagttctattctatatagggttataatcgctacgctatatactagttagtaattttactttatctatctgtctaagggtgatatacagtcgataactttctttttaccttaatcggagataattatatctaggatccctataatctaaataatataatctacaaataggtatactatagcttttacatctatttccttctgataaggaattgatattagtcgcttacttaaatagtctactactacaaatacagtattatacctatagcgatcttttagaaaggatctaaaatctattataatatattactatagtcgttccggtattagtaggggatatagtagtcctagagtacaatctctctatacctttattcttttataaattaagtagttatcgatataatacttgatatctattacctatcctagctaataatatcgttctaatactaatttctttagcttcttaattcctaggtatacaactaacagctatcgatatatcttattaagaagccttacacgaagatctcctttatcagggaccttaagtcggttcttaaaaagtaatagtctattataaagtatccactttagattacttctttcgatagctatctattagaatagttctagtttagtattttactagttagcttattttatatagtttataatcttaggatcttctagtttaattagtaagagctctacaggatatatacctttcttaaggcattctttaggaagtatagtaaactgtcaaccttagtctatatagggtaactccttctaggaaagtatattagtaataatattcttctttcctagttaatacttaataataaagtagaactgcgagaggaactcactctactaggcctatcgctaatttatctatcttatagttataaagtattctaaggattaataatctataataatttcgaaacgctcctttctagagaggccttctagctctagtcactactcttataaggtatagataatagctaataactccttatcctatactttatagttaagttcagcagcttatattattttcgagaagaaagctataggataccagaagttatcgttattatagtactacattaggactactcctaagaccctatttaaggtatccatttccacttaggtatagagttttagattataatagcataggatcggagcctcgattaggctttttttcaacttttagaaagtatctttatactatagtaactaatggtagactatatctctttaagttaggtagtagagtagcttagaaacagcgctatacccttagataaattatctatagaagttatagaatccgagaaaggactagactccctttactattataggtatcttctattactagattatatagatctttttaggattaatagctattccttctgtactaacgataaatcctaagaacttagtcttagttacagagaatttgtacttaggtaatacaacctatagacctactttctagagttaagagagtacttcttaaatatacctctaatattcctctatagtattactatagataaggatattatctataaataccacagtatatttatctatatattcccagagtatattatttataaaatactagaaggttactagcctatttattaatctaaagggtataaccttatatttaaaagatctatattatatacagaaagttataagatcttctgctctaggagttaactagatttagtgaaatccttaacggatatctagctttataaagaacttagctttactagttctttacagtactttattaatcagaggtagaggataataatccttctttaaaataccgtttagttattagaaatctatatagaattatagacctcctttaggcttctttactataaggataggcgaagtatagggggtagagctaggtacaataaatcccttcttaaggttatctataatatactgcttagtagcttttaacttattaaataataacttatagagagggtaatatcctagctatacctctacttcgaggataatatcgtggtctacccctatacagtaaggtaggagtttatcggattttcgcttaaagaagacttctacgaggttatagtattcctataggaaagttcttttaatttcttcgacctctatatcctagactatcgttaatttaatattaagaatacaatcgatttctataagagaagtcgagaatacttcgactctctttttagtatttatctttatatataatcgattaaatcctactctaccgataatacttatattaattagtaagagcgtctcccttagttcttcttcttaagtctactagactaagatagggggtatcttattattaaggttctatattatcttccgctactccttaacttactagtagctatactaataaacgtaggcttacagatagggctttcgggtttctagatcttattaaggtttattaaagaagtagtcttatctcttaatatctacttagtaatctttgtttattaccttattccttcttagaatttaagtaaatattagtatagtaagcttactcactacttcatcgaaaagtattccctattatagctagattattcgataataataatagttaagtagaacattgtattctgtaaactatattcttcctagtattaaattatactatcctaggtctataactaatattagaacttattattagatccttctatcgatatttaatataagtataatagtgtaggtaattaggtatactagttttctattaaatcctctaactaggtacttctaacttagcttatatatatatagactaaatttctttctaagtaatacgataagggtaatattaataaagatagatctgtctgctcttatatctactaatactttaattgaaaaggaacatctattatatattaagtttatattaaaaactaaactatttcctagacttcctaaaagtttctatagattaagggcactctcgattaggatggtatttaggtttaaagggctaggggtaggagtgataggtccctattagccggtatcttcttcctctagggtatctagaggtcgctttctacagctcactaaacttctagtttcaggagctatatcgtgatcgagaaaaagtttaaagatatgaactgagctagagctagtcgtgataactgctcgtataactatacagtttaaggttgaattttggagtgatacttagaattatgttatatgccaagtcgttcaaggaaagagtgcatttgtgtcaaaattctaagtataaggagagaagaagaaaagggaaaactatctacgagggcgttcctccttcttatatccttcctgtttgcttgtttgcttccagtgcaaaagctcgtttacccttcttggaaggaacgagggaagtcgctcctgcctagattgtcacagtaggtacatattatcctatctttaagacctattctaataaggacctctctatatccttctattattactttattactaaaatagtcctagtaggtatatactaattctaggttatcctcctagtatatatagaaatcttcgaagttataggtaagtattttatctaatctaatattaattagctagctattaaaactatctaagtattaagctattactattatagctatattactttatcctttactttatagtataattaagtagttctatatatataggctgtaagtctagtatactagtaggttttctaatagataggaatacttttaagctttatatagcctaaaaccgcagtaggtatatatcccactcttatccctttatattctttctttcttttccttaatatacttatagatatctttactaggaggtagttagttataaagtattcttttcttcttagatttattagatatacttaagttatcctattaaataaaagagaggctgttttatatggtataagtagtaggatactggaccaaagggtaaaatgagtataattataaaaaggagggttctcctccgagatctatcttagtatatatttatataattgctatatatagctgctaactactaatatactactagatataaggaatatacagaagtatattatttctagtcgatatacccccctagaagctatattatagctcctaaatttatcttatctattattaagctatctatctatctactagatcctagatatctactagtcctaaggactaaataaactttttataggattatactaatagtaacttagtaagtctatctacctatatattagtagtagctacctactagattaagatatagctagtattaacctcttagtatagctaatagttatagatatcgatatagtaaagcttagtttataattacagttatttataggtaagtaaatcaactatctattagttattataattaataataagattagtctagtagttaagattaactatatagagtagctattcctactatattactaactttctagccttagagatagtaagaagcttagtcttagttattaaggttataattatatattacttactagccttctaatctattactataccaaatagtttataaaggaagccttttaagcttttctaattagaatagttactaaataatatattactaaagaagtaaagtactagttatttatataataggtagtacttaagagctagatattatatattatatagatattagattaagtaattaactactttataatacttagatcttagattaattaggaatttagctagataattagctacctttactatattaaggtaagtaataactataggataaaaggctaagttaagcttttattagtacttatagatctattcctttattataatcctagaatacttaactattttattaataggaagtagggtttttataacagataaaggtctgtataagagggaaatatatataaacctatataggcttaggaaggaatatctatattatcannnnnnnnnnnnnnnnnnnnnnnnnnnnnnnnnnnnnnnnnnnnnnnnnnnnnnnnnnnnnnnnnnnnnnnnnnnnnnnnnnnnnnnnnnnnnnnnnnnnnnnnnnnnnnnnnnnnnnnnnnnnnnnnnnnnnnnnnnnnnnnnnnnnnnnnnnnnnnnnnnnnnnnnnnnnnnnnnnnnnnnnnnnnnnnnnnnnnnnnnnnnnnnnnnnnnnnnnnnnnnnnnnnnnnnnnnnnnnnnnnnnnnnnnnnnnnnnnnnnnnnnnnnnnnnnnnnnnnnnnnnnnnnnnnnnnnnnnnnnnnnnnnnnnnnnnnnnnnnnnnnnnnnnnnnnnnnnnnnnnnnnnnnnnnnnnnnnnnnnnnnnnnnnnnnnnnnnnnnnnnnnnnnnnnnnnnnnnnnnnnnnnnnnnnnnnnnnnnnnnnnnnnnnnnnnnnnnnnnnnnnnnnnnnnnnnnnnnnnnnnnnnnnnnnnnnnnnnnnnnnnnnnnnnnnnnnnnnnnnnnnnnnnnnnnnnnnnnnnnnnnnnnnnnnnnnnnnnnnnnnnnnnnnnnnnnnnnnnnnnnnnnnnnnnnnnnnnnnnnnnnnnnnnnnnnnnnnnnnnnnnnnnnnnnnnnnnnnnnnnnnnnnnnnnnnnnnnnnnnnnnnnnnnnnnnnnnnnnnnnnnnnnnnnnnnnnnnnnnnnnnnnnnnnnnnnnnnnnnnnnnnnnnnnnnnnnnnnnnnnnnnnnnnnnnnnnnnnnnnnnnnnnnnnnnnnnnnnnnnnnnnnnnnnnnnnnnnnnnnnnnnnnnnnnnnnnnnnnnnnnnnnnnnnnnnnnnnnnnnnnnnnnnnnnnnnnnnnnnnnnnnnnnnnnnnnnnnnnnnnnnnnnnnnnnnnnnnnnnnnnnnnnnnnnnnnnnnnnnnnnnnnnnnnnnnnnnnnnnnnnnnnnnnnnnnnnnnnnnnnnnnnnnnnnnnnnnnnnnnnnnnnnnnnnnnnnnnnnnnnnnnnnnnnnnnnnnnnnnnnnnnnnnnnnnnnnnnnnnnnnnnnnnnnnnnnnnnnnnnnnnnnnnnnnnnnnnnnnnnnnnnnnnnnnnnnnnnnnnnnnnnnnnnnnnnnnnnnnnnnnnnnnnnnnnnnnnnnnnnnnnnnnnnnnnnnnnnnnnnnnnnnnnnnnnnnnnnnnnnnnnnnnnnnnnnnnnnnnnnnnnnnnnnnnnnnnnnnnnnnnnnnnnnnnnnnnnnnnccttctaagcttttctaattagaatagttactaaataatatattattagagaagtaaagtactagttatttatataataggtagtacttaagagctatatattatatattatatagatattagtagacttctctaaagcccgttttgacctaacccgacccagcccggcctattgagatccaacggccactgctccgcacggttacccattagaccaaaaggtcatagcaaagtcagttcatgggaactgacttcactgcagtagtatatatatataggtgccccaccatatgggatcatactatagctaggttaggctataggcctaacttctcggcctatagttaggttataggcctagcctataggcccgcgcgggctttcgggcccccgtttaggcctaaatctaaggtaaataagataaataggcccctactatatagatatataagtaatgtatccttacctataataatatatattataattattataggacttagtaaaatttttagtaaaattttcaggagaaagtaaacttaatatattttcctagtatagctagaaatcattatctaccctactcttacactttctctaagaggcctagaatagtatatctatatctagtaacgctagcttatctatctctatactactaattctatctctatcctagcccctattctccctactactactattactattactactactactattactattactattactactactactactattactactattactattactattattactattactattactactattactattactactattactattactattactactactattactattactattactattactactacccctataaattttaccctccttattattactaattagattaagcttaatagtattattaatagggctattagcctcttctctcgcagccttaatctctatagaattaaagtactactagagatcctatatcttagtttcctaaatactaaatctagttatatagtaatatagtataaggtccttaatggttttagactttatataactatagtaataatagtaaatatcttatatagtattaaagagccgtttaatactagtactagttactagaattaagagaatattataggtaagtaatataattatagggaaataagattcgttctcttactaaaactataaaggcttaatattaactatatctaatagtagggaattagtatagtaatagatataactaggttatatatatactactattaaggtattaggttagcttattattagctagctttactaatttctagcctctttttaggagattagttagctaagagatacctagcctagtagttagtattttagctaatctcctatttactattagatattcttagtagggggctagtatttcttagaaggcctttctatacttatagtactagtaggcttcctattattatatctagaagaattaagattaactattagagactagtattatcttaactatataaatatttccctaaaggctagttatctatatatagtactctttaagctttttataactagctttaagtatcttaagtatctctaacttctatagaatatacttctactaaagtagggtagctacctagttaaagtagttaaagagggtattataaagcttaaagataagataggtagttatatcctttatctttaagagttctattataaagtcatagaaaggctaagtgatttatagaaggtagttaatttaatactattccttattactaaattatatcttagtatagtaaaacttagaatagaacttataaaaaaagtaatataatgtgatcccagacccctgtcatatgatcatatacgagcacgtgcctcgttatatgactattatatgcctatgcggtcctatacagaccattctatatacttgggtactcctaactcctatactagattgtacttagtcgttagcttacctaacctaatagaaaccatacaatcctctctatattatatctagtagtatattggtttaagctaactcctacgttagcctagggaggtataagatagtaaccgcggctgtacggctaaggtaaggtcagtccctcttataccatcctgatatataatctagtggacctaaatactaggtattatagattcttatcctattacttctcctatataccctcccgaacctttataagataaagagggcgctagggctatattactatagctagtactagagaatagtaagagaatagtcggtaaactaactattattagttaatattagattctaaggctataaaggtatctatagatatatattccctaactaatactgaggtatataatagctatatataacctaatccttctttcccttatatagtaggaggggggggaatactatatatagctagactatatattattagagtatatattattataaactaggttatataacctagggggatcctaagcggtagcctattatctaatatctaactatctagctagatctatatctaggcgctactactataaaaagggtagcttcctaacctaataagaggaatagaaactagttaatttctaccctctaagtaataaaaagctctaacccctaataaatatatctatataagcccctaaggcccctactctagccgaaatctatactaaccttctagatagtattaataaagcccttaacctcctaactaaggtagaatataatatctatatttagatatataggaatcctatagtaactaatatactagtctaccctactattattactactacctaaaaggcctaaagggccttagaagtatagaaagagactatatagctagttacctagtatactaaggaatagcctatataataagctacctataaagtagcctagtaggctacctagtaggccgcttaataggctacttagtaggctgcctaataggcctagtaggctataaataaggttatagatagggaaatatataagtgttttattaataatatatatagtattactaattataaaggtaaaatcactaaggatagtacctaataatagatatataactataactactatttcttagagctagcctagcttataggctatatagctctagataaagtaaagatcctctatatatctagataacttatagtaaatatacgaaaatatctagagtaatataaataagtttatatactaattaaaataatctattttaaattatagtaggtatttaaggactagatagaataagaattcactaaatacctagggttagtaaatatttactaatactagaaagaacttatataaagaaaaatgtctatctaggagtatactataactctataatagatagccgctaacctattatatactattcctaaaggatttataataagccgctttattaatagaactaataatatatattatactaagtaggtagaagaatagaataagcctaaaataataaaagaagtagtcttatattttacctagtataaataggggtaaatcataggctatatagtaggaactatcttattataggacctagatataatagaacttatagtagtagaagtaaggctaataaagaagtataaagatataaagtactttaactatagtaaaaagggctatcttacctataattattactaactaaagatagaagagacctagtagaaataaaaagaagctattaaataatctatagtaaaaaactaatatagctatataatattaaagtctttattagctatatttaagaggcttctaagtaactgctatttaatatagataacctccttaatcctagttatcctataaatatactagtacctacttagctagagttacccctatagctataggatagggagaggagtaagaagaaaagaatttaaataaaatataagtactataagaaatagtactataaaaaatagctatttcttaatatctcccttaatatcttaggtaatatattaatattctactagggaaaggtctttactcttaatctagtataggtctatatacttcttaatagtagattaagtaatatatttattactctataagttcttaagaaaataggtagtaatatctaaatctataagcctaggattcctctaaaagtcactattactaatagtaaataccttaatatagctagttatatctatctactaattaaaattagggattagactagttaaattaaggtataggtccttaatatagaatataacctaatccttagttataatttcctctataaagagaaccctaggattaattagtagatattagttataatactaatagattattactactatatatatatagtataccctataaataatacttatataattataaagggtaatatatatattaatttaatattagcttaatatattagttagctaatatagaaggctaattaagaagcctacctctttattatctacttaattaaagatagggctagaataggaaacctagccttattctagtattaggataaggaaattaagtatattatatagaaatataaggacttattctatatagagctccctatagtactatccctagaatgtaatattatatataatatcgatataggaataaaccggctagtaaatattaatatataccccttctctactaagaaacttaataagtaagtaaaataagttaaggatcttatctataaggggcttatctattactctaatagcgcttagggattcctagtagtctttatatagaagcctaataggaagtagtatatatatatcgattactaggcccttaattagatatctaaaaagaatagataccctttcccctatatctaagagctactagatattataggaaatatataagtcctttcgaagattaacttaactataggatactagtagatctatatagggaagggatctattaaaaagatagtatttaatataatttagggtaaatataaatagcttattatactattcggcctatataatatactagctaccttctaatcgattattaataatatattatacctacttcttaggtagaatatagtagtttacctagataatatccttatctttttgaatttaatagaggagtattaaaaataccttaagtaagtattattactcctctaagaatagtaattatatactttacctataaagtatatatttactatagaagaacttaagttctatagatatattattaggaataggagtatttagtccctttctataaaaatcgaaactattaatatatagctatacctaaaaatagtctataatatataataatttattagacttactatatactattagagatttatttataactttacaaaaatttatatccctctctataaacttcttaaaaagagtaatactatattataaaagaagtacttctaaccaattatctagttagaagtatataaaagtatattctagaaggtaaaggaattccttacctttatattagtcctaaagtaacctaattagaataagctatatataattaaaactaataccttagaataggctcttagaatagtcttaatatagaaggataataaaggtaacctttacctaatcgcttataatagtcgaaagctctatagtatagagctaaactatcctatatataagaaagagctccttactattaaggaagctatctatatataggataagtatatcgatagtaattagtttaaaactattattattatagataatattagcttatagtaccttaatactataaaggagtatagtaagtaccttatatattaagttactaagttttagtaatattagctagctatctattactaaaaagggtcggagaatattattatagatataattagccgctatcttaaccttattagagacttattagctaatataagtaaagaacgccctatataggatacttatttagtaataataagtatagtttatagtattctagaagaagactagcttatagctataattcagttccttaaggatagaactaaatctaaagactatataattacttaggctataaagaagtttactatatacctaagcttttaggatatctaagccttcctaagggtatccttagaagagaatagatagcttatatatatatataaagatagaacgattttactatatcttaagctcctattctaagctaatcttctttataatatctactataagttcggctacctaggcttcctaggctttaatagtattatctaaccttatagctagtagctaataatctatactaatatagaggatatagttaaaatctatctaaactactaggtatcctaaggctcctataaaagcctagaatataaggtagtataatatatagttataagtagtatctatctatttaaacgataggaaattaaccttatcggctatttactaattactctaaatagtaactaatagattataactataattaactatataataggctagctggttacctatatagtcctagatataatagaagaggctcttatagaatttctttactataatatctatatatattatagagtatttaataaaatactttctaataatagcctaaacctcttatttagtatagtataatactttataggcttactaaaagcttattattatataattactctatatcacccttatactaataggaaagtagaaaattttaataggttaatcggttatatacttataaaataccttatagggaaacctatatacttataggataagttccttataaaagctatatttactacctaggtatataaatatataattactaggaaaagcctttatttcctagtttatagggtctatccctatattattactaatagtagtaacttattagataagttatccgaaaccaactataataaatagatctagaaccttatagatatttacttaaaagtaaacgaactccttcttatttatataattaaaaaatagaaggtatataatactatagttataaagatatcctttaagctagataattaggtcttagtaagaaataaggctaagaagaaattcgagaatacttagtttaggctatataaggtaatttagttatatcccttaggtatatatactctagttaaactaaatagctatattctaagaaaccttattaatagtataagactaatagatataaatattagtaataatcctaaattataggctttattagctagctattctatattctactatatagggtagaggattagctaccctaaagaaatctatagaatccttaataagattaaaccccttctactaacttatatagacctttctatatttatatataaggaatagtaggaatttaggtatttaggataatatactaagtttatagggaaggaagttatagctaaatatattattataaaaatataagtagctatatataagagatagagagatataactattaactaggtacctatatagggcctactagatactaataagtaggacttagaagtaaataattataaatctaaagacttagactctatagaggattcttataagtctttagggtataaattaatagaagatacttattaagaacctatataaggtttagatcgattagtatatccctttatagtcgttattctatccctattaagagatatttagagatatataaatatagagagtttataaatttagaaaagtattatattacctactctataagggaccgaaagggcctacctaaagggtataggctaatataaactaataagaatataggtaattagcttaagaaaaatagaaatagtaaaacctactacttataggtatttaaaatattactattattatctctattatcctttctagaactactataattagagttatctactatagtctactaactatatactactattacctcctataattatctataattattatctatataataatatatagcctaaagatatataaaaatattaactacctatacctagttatatatcctatatactataggctaattaaatagagtataatatatcgaattattatactctagcctagaataccctattattatttctatagaaagagggagaggagtcgttttcttcctagatatcttctactactttagtaacttagtaacctctataggaactataggtactactatagaggccttagtagctatatatttcttcgataactcttttattactattagaggttattaggtagtagtattaggtataatactactagccttctatcctactatatctttagtagctactatacccttagtagctactagttccttagtagtaaccacttctttagtagctaccttatttttagtatactatagtcgctttttataagtaggcctagatagtctagctgctagagtaggaactgctctaactatatttagacctatatcctttatatattatactatagctagatataaaagaagatagaagtctaattagacctaataaataaggtcgaatacctattaagaggaagttatacctatataatcggcccctatacctacgattagtaatatactagtataatcctaaataaatacttatatagtaagtatttactcctattactagaaaactaatacctagtatagcttagtttctactagaaacctaaacctataaggaaaataatataataagatcgaaatagcctattagtttttcgataggctatataattcttcctaataggagccttataactaattaactacctaagagtagtataaattattatagtagtacctaaatatacctttatagttacctactaatcgattactctatattataattatatagatacctaaacttaattgcttatactacctaatagctatattaataatagatacctatcctaattaaagctattactattactagctacttagccctaaataagagttataacctccttactagtctatatagaataggaccagcctattagactattattataatctaactatagaattagagataatataggtactataactatactattatttctaccgagagggagagccttaggactatccgaatctctataatctattaagaatagttagtataatactataaagaagtagataaatatatataaaagagacttataatatctataattaataataaagatatagaatttttttttttttctctaaaataaaacagagtagtagttaagaattgatttaaatatttatagtaataaacttagggggatttataggagattcttatctctcctattatcttacctagaagagcgtttctttatctatattcccttataactacccctatcctttaaagccggtatactaatacattcgctaatatagtcctatttaggcctttaaatacaaaataaggctttatacctaagagctatttatcgagctccttttaactttccttttattaattaaatatagtattttaaatttttcttccccttttattattattaaatataacattttatttttatttttattttttccttattattatatataataccgaatagtctaggtctagtctatactaactattccggcccttttatatacccttatcgttcccttttagacctatttataggaacttaatacctttcctttttagtttcttctatttatatatagtttaaagaaactgaggcagtttctaccttagtaggggaggatgtaatcccagacccctattatatgattatatacgagtatatatcttattatataactattacgtgcccgtgcggtcctatatagaccattctatatacttaggtactcctaactcctatactagattatacttagttattggctcacctaacctaatagaaaccatgcgatcctctctgtatcataataatctctttacctactaaagtattaagaatattaaattctattaggttaatatatcctaaattagaataagtttctacccttcctcctagtccttaagaaaggtatcctagtactaggggctagtatagatatagatagctaggaagtagaccttatttagtatatataagatcttctatatcctatacttactatttttccttactagctataatttctcttagtcctactttatcttaaggaactaatttttaggtattacctttaaataactaaggagctagcctagagaaagttagataatataggtaagataggatacttagaatatctatatattattagggagtactatctaagtagccttaactaaggttatattattagatatattattagttataattctaaatacctagtctttaatctagtacttatctagtattttaagaaggatagtacttagatatttccctatatatagcctataaagtagcttaaacctaagtaaaacctcttagtatacctagctactattaataaagtagttagtaattactataaatacctagttatatagagaagtctaataatctaaggtaactaagatttttatatcctttagtagtatatagaatactatagataggccctatctaatagccttttataggtagtagtaaatagtattagtagagggtacctttagaaggaatagtatagagtaggtaacttagaagagcttctaaaatactaggcttttaactatataaaatagaacttagtatcctataataaattagaaaagactctcttactaaaggttttataaaaagggagtatcttaggcctagaaatctaggtctaggtatataaataagtttttaagataggaatataggccctagtaatatactatactttaaagaaattaggctattatttcccttccttttttccctctctcctaggccttctagtaggcctatattttaaagtaccttattattattaatatactattataactacccttaatagaagatagggagtttagatattctaaaagactatagtaggccttatactagacctttagtatcctattcctagaataggctacctagctaaacttatactagataggagtattataagttaaatcctagtatatctagtctttaaacctctacttatagttagtttatagctactacttaacctactctatatatactatctttttatagaagataaaggcctttttctaattagacctaatataggtaagataagataggggttcttaatagcttaggggatataggaagttagtattagaggatataacctagctattagatagtagaagaaaagaggatagaatttaagtaaactctacctaagaagcctaagggaaggagggaatatagcctaggctataggctagatctatatctctattagaataaatacttctaggtattatacctagtactatatataataggggtagtagtatagagtatagagatagggataggatatatataaaataggatatatataaataggaagtatagtcttctataataggagcttagcctattctctactaggtaggtaggtattaaaaagggttaaagattatctaattaggtaatagcctaaattaaatatagctatatagctatatagcctaagaaaaaaccttacctagatagatcctatagatagtaggtctactatactataaatatatagttagtagaaattataagaatatatactacttttagggctaagagttttttacctaaaaaactagtaactagttttttaggtaaaaaaactataagtagtagtagtaaagtagaagtataaaaataaactacttcttaggctaagagttttttacctaaaaaactagtaactagttttttacctaaaaaactttgagtaatagtagcaaagtaggagtataaaagtaaactacttcttagactaagggttttttacctaaaaaactagtaactagttttttacccgaaaaactttaagtagtagtagcgaagtacttcttagactaagagttttttttacctaaaaaactagtaactggttttttaggtaaaaaaactataagtagtagtagtaaggtagaaagaaattattatagttatatttatctataaaaaaaaagatatatctagtaatatatctagtacctattgaaatttactaatatagccttaattattaaccttcttaaattctctattagccttactaccctcctcctcccctttacctatcttaatattaatactaatattattattaggctaattattactactattattattattattattactattactactattagtattactactattagtattactactattagtattactactactagtattactattattaagaaggcccctcttatatctctaaaagaataagttcttcctataggcatcctttttagccttaatagttagcttaaataggtaagtatactctagctatacctcttacctctaattctaaatatatattactatagcggccttattaggcctaaagagtatattaaggtcctttatagtaactagtattatctacttagactaccctactaggtattctaaaatagtagaggtagtatagaagtaggtagtagtaggaaaggtatataggatatatatatattaccgacttattagtctagagggtatcctagtagcgttaagaaggtctctatatacagctaatacctcctcctaggacccagacttaggtatatcgagtattaagtaattatccctaatacctataaactatagtaagacagtcttcctctatctagttactagtcctattaagctgtaaggaagggtaggaagggataggtagacgttacctaccttatagacttactttttccagtttattcggtactaagccacatcctctagttaccatatctttagggtaatcctatagataaagctattagggaccttaaatggctttcggctagataggttttctgggtcctctatataggtttgtagattgttctactaagaagcaatgtagtattatattcctagtagaataatagtataattaccgttatcttcgttattaagggagactaatccctataggatattactgcccttactagtagcgataaactccctaatattaatatcaatatattagaatgatattctcttactaggtagcgtactctttatatagtatagaaatacaattaatttctattagtagtccagccgaaagaatatataataggtatagtacactaggtcttattagattagttactatactaggctatactatatactccgtagctagctaaggtagtacctataatacttactaaaatagtacttatatatatcgaattcttagtagattagtaatagaattctactagggtaggtactattaaagtcctcctttagctacctaagtagctatagtaatacnnnnnnnnnnnnnnnnnnnnnnnnnnnnnnnnnnnnnnnnnnnnnnnnnnnnnnnnnnnnnnnnnnnnnnnnnnnnnnnnnnnnnnnnnnnnnnnnnnnnnnnnnnnnnnnnnnnnnnnnnnnnnnnnnnnnnnnnnnnnnnnnnnnnnnnnnnnnnnnnnnnnnnnnnnnnnnnnnnnnnnnnnnnnnnnnnnnnnnnnnnnnnnnnnnnnnnnnnnnnnnnnnnnnnnnnnnnnnnnnnnnnnnnnnnnnnnnnnnnnnnnnnnnnnnnnnnnnnnnnnnnnnnnnnnnnnnnnnnnnnnnnnnnnnnnnnnnnnnnnnnnnnnnnnnnnnnnnnnnnnnnnnnnnnnnnnnnnnnnnnnnnnnnnnnnnnnnnnnnnnnnnnnnnnnnnnnnnnnnnnnnnnnnnnnnnnnnnnnnnnnnnnnnnnnnnnnnnnnnnnnnnnnnnnnnnnnnnnnnnnnnnnnnnnnnnnnnnnnnnnnnnnnnnnnnnnnnnnnnnnnnnnnnnnnnnnnnnnnnnnnnnnnnnnnnnnnnnnnnnnnnnnnnnnnnnnnnnnnnnnnnnnnnnnnnnnnnnnnnnnnnnnnnnnnnnnnnnnnnnnnnnnnnnnnnnnnnnnnnnnnnnnnnnnnnnnnnnnnnnnnnnnnnnnnnnnnnnnnnnnnnnnnnnnnnnnnnnnnnnnnnnnnnnnnnnnnnnnnnnnnnnnnnnnnnnnnnnnnnnnnnnnnnnnnnnnnnnnnnnnnnnnnnnnnnnnnnnnnnnnnnnnnnnnnnnnnnnnnnnnnnnnnnnnnnnnnnnnnnnnnnnnnnnnnnnnnnnnnnnnnnnnnnnnnnnnnnnnnnnnnnnnnnnnnnnnnnnnnnnnnnnnnnnnnnnnnnnnnnnnnnnnnnnnnnnnnnnnnnnnnnnnnnnnnnnnnnnnnnnnnnnnnnnnnnnnnnnnnnnnnnnnnnnnnnnnnnnnnnnnnnnnnnnnnnnnnnnnnnnnnnnnnnnnnnnnnnnnnnnnnnnnnnnnnnnnnnnnnnnnnnnnnnnnnnnnnnnnnnnnnnnnnnnnnnnnnnnnnnnnnnnnnnnnnnnnnnnnnnnnnnnnnnnnnnnnnnnnnnnnnnnnnnnnnnnnnnnnnnnnnnnnnnnnnnnnnnnnnnnnnnnnnnnnnnnnnnnnnnnnnnnnnnnnnnnnnnnnnnnnnnnnnnnnnnnnnnnnnnnnnnnnnnnnnnnnnnnnnnnnnnnnnnnnnnnnnnnnnnnnnnnnnnnnnnnnnnnnnnnnnnnnnnnnnnnnnnnnnnnnnnnnnnnnnnnnnnnnnnnnnnnnnnnnnnnnnnnnnnnnnnnnnnnnnnnnnnnnnnnnnnnnnnnnnnnnnnnnnnnnnnnnnnnnnnnnnnnnnnnnnnnnnnnnnnnnnnnnnnnnnnnnnnnnnnnnnnnnnnnnnnnnnnnnnnnnnnnnnnnnnnnnnnnnnnnnnnnnnnnnnnnnnnnnnnnnnnnnnnnnnnnnnnnnnnnnnnnnnnnnnnnnnnnnnnttcttagcctcactaggcccctctcttcttttaggtactatttttaaattatattataagattagatatctcttaattctcctaatagtctttaattagtatttaggttaaaggattcggttatataggtattataattcactataatatacctagtatacctatattactagctatactataatatagagtcctagtcctagatatatataattaaatactaattttcctttaattctagcctctttattaataaaatatagagatccttaataaattataattaatcttaattatttatagtagttagggatactaaatattatttaaatatatatatactagtacaattaaatatatatttctatatagagactagcctatctataaagtattactaaattggtctaattttttttttctttctagaaataatgagtgactagctatattaaaaattattttataaataaaaactaaaattttaaggctactaggatataaaaggctattatttaattaggaaactaaaataactatatactattctacttagtaagtagacttctaggcgctaagatatatactctagataaatttaggctaaggtaggccgttcttaggctttaggcctaggagctataaatatacgaatttatctataaacgttaaaaataaagctattctaaggttaccttactaatatatctaattaatttatttacttaattagtctaattaattggttttatctaaaatttaattataggtttatacagtatttcgctaggctgcagagtttttaataatctgcaggctttagtcctaactccttcatacaattataccataactagcaataaattacggttacatttaattaattagatactctctactatctagtatttaaatactgtttttagaattaaattatctcaattattagtggtggttaaattgattagataaatttgcatttatatatagcatttatatatagataggatgaatttacatttatatatagataggatgaatttgcatttatatatagatgggataaatttgcatttatatatagataggatgaattagtgaggtaatctgggaatggctttatttttaacgtttatagatgaatcggcatgttgcgggaagactagataaattggtaaggtgatctaggaatagctttatttttaatatttatagatgaatcggtatattataggaagactagatgaattagtaaggtgatctaggaatagctttatttttaacatttatagacaaatcggtatattataggaagactagatgaattggtaaggtaatctaggaatagctttatttttaatatttatagataaattggtatattataggaagactagataaattagtaaggtaatctaggaatggctttatttttaatatttatagataaatcggtatattacgggaagattagataaattggtaaggtgatctaggaatggctttatttttgatatttatagacaaatcggtatattataggaagaccagatgaattagtaaggtgatctaggaatagctttatttttaatatttatagatgaattagtatattttttattagaatataactagactaaaatagtaataaaaaactgtaatttattaatcttatataatctaacttataagtgctaagacctctatattatataaatttaggctaaacaggctatttataggcttttaggcctgacccacgcgggctttaggccgggctgggcctagggaggttaggcccgaagcctatacaggtcgggctataggcccgaagcctatacaggtcgggctataggcccaaattttgggcttaggttaggctttagagaagtctagatattagattaagtgattaactaccttataatacttaggtcctaggttaactaggaatttagtaaggtaatttactacctttactatattaggaatctaggataagttataactattagataaagggctgagccgagcttttattaatacttatagatctattcctttattataatccctaagaacttagttattttatttataggaaatagggttttatacttataactactagtaagtctatacttagttactattaataagatataagaatcctagtataactatagtttataatttatagtatcttagagaatatagattctaagaaactagcttactttccctatcttataaagctcctagtactattttagttcttctttaagctaaagtacttcctagagctaagattaatagtaaataataataatattattaatatagaagaagataattattctattataggtaaagagataaggatcttctagaataaagataaatcctagctttttaaatacctaggttacttccttttactatagtctaagtaactttctaagtctatagaatactttataaagcctttat

SEQ ID NO: 23 - DNA, 28527 bp, Penicillium roqueforti
attaaatgattctagtatagctatttataatagagatgttatacctgctgtaaggaattgaaaaagtagtatatatgcttataataaaaatgctattaatttaattcctattaaaagcaaatatgtaatgaaattaattaaagcttactttaatttatatcatttacaactagaatctttattaagaaaaaatagattacgtcgtagatttagaaaaatatctacaagtagaatatttattagtgatggtgaatttaaacatactaatgataaagtaaatataacattatatgtttataataaacaaaaacttaattttttattaaaacttaaaaaaagatatttaacattatttaaaaaagctaaatttgctagaaaattaaaattaataaaaaatgtaggattaaatattttgtgtaaacatcaacaaaaaagtatattattaagtaatcttttacctaaatataatactcaagtaaatacagcacaaaatatttattattcaagatttattaaaaaaagttttaaaagattaagattctacatgtattataaacaaatgctttatattaataaagctaaatttgaaaatacttatttacaaggtttagtaagtttagtaaaaaatatttttaataaaaatgttgaatttaatataattaatttaaaatatttttattttaatagtaaaatatttactcaacctttagaattaaaattaaaaaaaaaaagaaatgttttaagatatcttaaagttttaataagaaaagctaaaattaaaaatgttaaattagcagataaatctaaaaaattctttaattttaatatttttaatagtgataattttttacaactagataatactaaatctaaatatcttaaaaaaattattttaagtaatttaaaatataaaagagtatctggtgttagattagaagctgctggtagattaactagacgtttttcagcttctagatctcaacgtagaactaaatataaaggaaatttagaaaatgtttattcttcatttaaaggttatcctacaccagttttaagaggaaatgataaagctaatttacaatatactgtaattaactcaacttcacgtgttggagcttttggtgttaaaggttgagtaagtagtacttaatttatcttttctttttattttatttacaaattttccctcccttatattaattaataaagatgatgaaatagtctgaaccgttttgagaaaaatggaaataaaagtatattcggcgcgctttgcgcgcttattcagcttctggctgaatcttttatgataacataaattgaacaggctaatttgcgcaagagagtacaaattgagtgcgcggtttggcacctcgatgtcggcttagctcatcctcatgcatgcagaaatcatgaagggttcgactgttcgtcgattaaagagctacatgagctgggtttaatacgtcgtgagacagtatggtttctatcttctagaggaacataaagtagattaaagatagccccttcgtacgaaaggagttgggtatattgatctctggtttacctgttgtttatgatttatattataacatatgttataatgataactaatacttatactaaggtattgttacactattagtagtgtagccagacaacataggcatggcaggaaagctacatcagtttaagataagtgttgaaagcatctaaacgcgaagcaaactttatgatacttttatacgtagtagaacactacgagcataattgttattttttaacaattaataggctttagttgtaagaatgaaaacatttttagatataaagtactaatttttaagaatagtatactaaatattattaaatatcattataatattttatatgttacaataaagccttattagcataaaagtaatgcaaccgttttgtaatcggtagaagtgagttcgatactcgcatagggctaaatatatttttagatataatttaaagacccaatggtcaagactggttaagacataacattttcactgttagtgcgggagttcaaatctcccttgggttaaaaaagatttaatatgtaaatattttttaaaaagagattagctcagttggtagagctgtcgctttacacgcgaaaggtcaggtgttcaaatcacctatctcttaaagcgaattaatgtaatagtaacatatatggctcatgtccatattatttaggtgcaaatcctaagttcgctaccaaagactatagcttaattggttaaagcgaaccactcatgatggtttgagtaaatgttcaagtcattttagtcttatttaatccgagtgctggaactggtagacagtcttaacttaagcttaagtggcgcaagccgtaaacgttcgaatcgtttcttggatatattaggggttatagtttaactggtaaaacaacgattttgcatatcgttatttcaggatcgagtcctgataactccataactattaatattgttaattattaacgcttgagaagctcaattggtagagcggatcattgaagctgattaggttgtaagttcaaatcttatctcgagcaaactttgataacatgactatatagacatgggtatgctgaaattggtatacaggttccgcttagaacgggatagtttaaactatgcaagttcaagtcttgttacccgtatgtatatatatacatatagtttatgttgtcgactaataggtaagtcataaatttttggtatttaccattgggtgttcgagtcgccccaacataagacaaattattaaatattttttttattatgtttatgatttagccaggatagtttaataggtagaacaataatttcatgaattaagaatgagaattcgaatttctctcccggctttttatactttacctatataaagctatattaaatgtttaatttattaagtgttaattagtattatattgtacagtttaaattccggtattatagtaatcttactgtgtgtgttctacttctagtaagatacatacgttaacttttactatatactattctagtttgattacattatgtaatccttttaaatattctattataattaattttacctaaaagtaaaaaataattataatatattaatcaaaataatattttaaatattattttccaaagtttattttaaactttggggtatagttataggttttacaaagttttactttaaacatactaaaaaaacaatttaattataattttattttgctcgccgctaatcctttattaaattacagacaagatctggatacaaatcaaatattacattctagttttgatactaaatgtaattattctacacaagtaaatattgctgatcaatcaagcagtagtacagtgttagatttaaaacaacctacagaatgacaagaaagatgatttttatcatctaatgctaaagatattggtactttatacttaatgtttgcattattctctggtttaattggtacagcattttcagtattaattagattagagttatctggtccaggtgttcaatatatatcagacaatcagttatataatagtataataacagcgcatgccatattgatgatttttttcatggttatgcctgcattaataggaggttttggtaatttcttattaccattactagtaggaggtccagatatggcatttcctagattaaataatataagtttttgattattagttcctagtttatttttatttatattctcagctactatagaaaatggagctggtactggttgaacattatatccaccattatcaggtatacaatctcacagtggacctagtgtagatttagctatttttggtttacatttaagtggtattagtagtatgttaggtgctatgaattttattactactatcttaaatatgagaagtcctggtatacgtttacacaaattagctttatttggatgagctgttattattacagctgtattattattattatcattaccagtgttagctggtggaattactatgatcttaactgatagaaactttaatacatcattctttgaagtagctggtggtggtgaccctattttattccaacacttattctgattcttcggacatcctgaggttaaatttataagcctcgtaatgttgctatatgctggaaaagcttcgatatctagttttaaatactccctctttattgacatagtaaaaaagttaaaacaatgaagccaatcagcaggtaacgcttttattttaaaaagtggaacctcagagactatacgcaacaatactgaaaatataaaaaatatatcgattcatgtacctactcatttaaaaccattaaatgatgaacaatttggacattatttagctggtttaatagatggggatggtcattttgataatcaacaacatttagtaatagtatttaattcacttgatgtacaattagcttattatataaaagaagtaataggttttggacatgtgagaaaagttaaagataaaaacgcttatatatacgttatatctaaaaaagatggtatacttagaactattaatctaattaataataaattaagaactagtaataaatataatcaagttattactcgtatattacaaagtcctaaatatttaaatgaaaatatagttttcaatataaataattcaaaggatttagataatcattgattagcagggttttctgatgcagatgctagttttcaaattaaaattattactagagatattagacctagacctgaaattagattaaattttcaaatagatcaaaaacataatgatttattattattaataaaagaaatatttggtggtaatataggttatcgaaattgtcaagatacttattattatggatcaacaagctttggttctgctaaaaaagtaataaaatattttgataattatcatctacaatctagtaaacaccgtagttttcttcaatgaagaaaagcgtatattataatacaagataataaacatttaactgaagaaggtttaaatactataaaattattaaaagaatcgataaataaacattcagtataagatagagtcctaacaaaaatgaaagtttttgagtattaaacttaatagatctatataagactattaacttaattaaaacaaatgttatattttaattataccaggttttggtattattagtacagttatttcagcagcatcaagtaaaaacgtatttggttatttaggtatggtttacgctatgatgtctataggtgtattaggatttatagtttgaagtcatcatatgtatactgtaggtttagatgttgatactagagcttactttacagctgctactttaattattgctgtacctacaggtattaaaatatttagttgattagctacatgttatggtggatctttacatttaacacctcctatgctttttgcattaggatttgttgtattattcactattggtgggttaagtggtgttgtattagctaatgcttcacttgatgtagcattccatgatacttactatgttgtagctcacttccactatgttttatctatgggtgctgtatttgcattatttagtggttgatatttttgaattcctaaaattttaggtttatcttatgaccattttgctgctaaagttcatttctgaatcttatttgttggtgttaatttaacattcttcccacaacatttcttaggtttacaaggtatgcctagaagaattagtgattaccctgatgctttctatggttgaaacttaattagtagtattggttctattgttagtgttgtagctacatgatatttcttaactattatttataaacaacttacagaaggtaaagctgtatcaagatatccttgattaactccacaattatttagtgatactttccaagtatactttactagaaataatagttctttagaatgatgtttaactagtccacctaaacctcatgcttttgcaagtttaccattacaatcttaatgtttatatattataataattagattagttattattatatatcatacatatatgatttttttttatttttaataaagatgatatggtattacaatacacacttacttttatagatatatttgtatagacatagaggattgaccctgtgtgactataatatataaaaaaaatatataataacttaatttaaggttaatttatattttatatgcttcaataaagatgatatgtatccatatcttgaaatttataataatctgtagatttgtattctttttcgatacaaatatgattaattaaagatgatatgtaccatctttgagtaatatatataataatattctaattgaatgttctgtatataaccataaacatgtgatgttgtatccaaaaaatacacattaattaatattgtaattttttacttaatatatataatttttatgtattaataatataattatttaatataatctaactttagattaagaataatatcttagagatctaatctaaaaaggtagatatagttcaaaggtagaacggttatctgtggcataacatatcttagttcaattctaggtatctaccctaactatataaatagatgttagcataaaagcacaaaagtgactttaactgcatctataagttaacggtccccattgcaatgtatgtatctaatctaattagatacatatgttaactttatactattataattatatgtaattattgcgtctatttattcaggtaattataattgttttatagttaatggtaaaatagtaatcttactgtgtgtaatatctctagtaagatacatacgttaactttataataagctatttagtttgattacactttgtaattatttttataaataataataaaaaatattattataccaaagtttattttaaactttggggtatagctataggtttttcatttaactttgaacatactaaaaaaaataaaacaacttaatacaatgatgtttcaaaaaatgaacaaaaaatcgatttatatattaaatcttacacttaataaaagatggattaataaccaatctttaatccctagaccatctagaattgatagagaggagatagatcaaaatatacctaattcatctactaatccatatactaattcatctactaaacctgaagaagagatagattttaatacgatcaatactggttcaagttcttctagtaatgtattaccgatacgttgtaaaagagaagcatctgttactttatctagtgaggatgataaaaaagctaaattatctcatgataataataatgagaatgataacgtgaatgataatacatctgttataaatagtattgaacccaatactagcacaccgcgtgagatagttaatactgaaacattagaggtagcctcaaatactactaacaatgtagcagtaactgaacctcaacttgaggctttagctgaatctctagctagacatacaaatacccataaccaaataaagtctgatatttttcggataatagatgatatacaaacatctctaggtttattagaaatgtatctggaagatagccaaattcgtatagatgaaatacaacggagtatgtataatcttattagagaccatgatcatatagaagctgatgatgatgtacctgtattaatgtcagataatgattcagatagtaatagttcaattagcgacaattcaaataatgattttaatctagatgagcctagtataatactggcacatcatagccctcaagcagatccaactcctctgattataggaatggagccattaaataatggtatagcatctaatctggttatatataatcatgaaatgcgttatgatcaattcatacataacaattactctatacatatgtcaggtttagatactatagactaccgtatgtcttatgagtatttaatagatagtttagattatctagacagactaatagttcaacaccaaacgttggatgcattagaaagagtaatcttacccctaaataatgggttagatgttcaatcccaagtagttgagatagaaatctcaacaatatttgaattattaagtcaattatgctaaataaaggctatataaaatatttaactgtaaagaactatatgtaaacataatttaacttaaaactatgttacaagcagctaaaattataggtactggtatggccacaacgggattaataggagcaggagtaggtataggtatagtttttggtgcattaatactaggtgtagcaagaaatccttctttaagaggacaattattttcatatgctatactaggttttgcatttgcagaagcaacaggattatttgctttgatgatggcttttttattactatatgtagcttaataaagaatacatgtattaatgtcaatcttatatatatttatttttttttaatttaataataagttttattattaattttaatttaaacctctgtaagaaaatattaatataaaacttatatcttataaaattttaaacctttaaatatgacaacaacaactttttttttatttttaattccagtattaggtataatattattattagttaatttaatactttcaccacataacccttatcaagaaaaggatagtgcttttgagtgtggttttcattcttttttaggacaaaatagaacacaatttagtatttctttctttatatttgctttattatttttattatttgatttagaaattttattaatatatccttatgttgttagtgcttacactaatggtatttatggtttattagtaatgatagtattcttcctagtattaactttaggttttgcctttgaattaggtaaaaatgctttaaaaatagaaagtagacaaatatttaattttaatataaaatcttgaaatggttattctttaatttataagtaaattatatattaataatattttacttattattaaattaataaaatatatatatatataggtagggttagtaacttaattggtaaagggttttcttgtcaagaaaatagatatcggatcaaaaccggtctaactcgtatatgtatataagattacataaagtttacatgaattagtgtgataaattataactataataaaaataaaaataaaaaaatgtttttatataattatatatctaaattacaattagatgctccaactccttggggtgtatttttccaagatagtgcttcacctcaaatggaaggtattgaagagttacataataatattatgttttatttagctattatattatttactgtaacatgaatgataattacaatattaagaaattttttagccaataaatcacctattgcacataaatttatgaaccatggtactttaatagagttaatttgaacaatatcaccagcatttatattaatattaatagcattcccatcatttaaattattatatttaatggatgaagttatggatccttcattagttgtttatgctgaaggtcaccaatgatattgaagttaccaatatcctgattttacaaattcagatgatgaatttatagaatttgattcatatatagtgccagaaagtgatttagaacaaggtcaatttagaatgttagaagttgataatagagttatgatacctgaattaactcacactagaattgttatatcagctgctgatgttatacattcttatgcttgcccttctttaggtattaaagcagatgcttacccaggtagattaaatcaagcttctgtttacataaatcgtcctggagtttttttcggtcaatgttcagaaatttgtggaatattacacagcagtatgcctatagctatccaatctgtatctataaaagatttcttactttgattaagagaacaaatggacaattaaatatacaacaaaaaatgaatatgacgacaattaaattaaaaagatatatacttatatctctaacaaaaatatatttagatttaattatagattgtaaagcaggtgatagattatattttatttatagaataataataatagtattatttatatatacttttataaataataatcctagccttttattagaattattagataatcttaattataattatttaaaccaattatatgatgattcctttataaagattaatagaggtaaatttagttatacttgaaatgagtttaatcaaagatctagaggttataataatggttcaggtggacctaatcataatcctaatccatctttatatgaagttgaaaatactagaaaacggttagaagaagaaaataaacagtcaggtgaaccttctcgtatgcaatttaaacccagtgaacttgaaaatgtacgtttaggtgataatccatctagggtatttcagttttgttactatagttcagttgagaaaagaatggtttatcctgaagactttcatcctggtttacctatattgttaaatcatgatagatttcgtgtatatatagataatggtataagttatacttataattatagatctttagacccatctcaacattattgtatgatagaatatcttgatgggagtaaatgttatctaaacgatgcatctaaaattgcagcaaatatagaatatcatagacgtcctattaaagatccgtcttaaatgaaacctacgtatttttatgatgattattctaataaatattttaatgtttttagaaaaggaatctttataaaattatcttaaataaatatatttaaattatcttaaataaatgtatttaaatagaaatcaaattaaaaaaaaaagaagtaatttactaataatagtatatatatattctagaagtaaattacttatattctagaagtaaattacttctatatttttaaaatatgttaattcaatggtagaatagcgtgctacggacacgtaaatataagttcaagtcttatacatgtttatataatattaattaatatttataataattatatttagatatgtagtatagataaatcaaataaaattttatataagtataatgaatttttcaatatttttatttgtcatagggatattaggatttgtattaaatagaaaaaacattatattaatgttaatttctatagagataatgttattatctgcaacatttttaatattaatcagttcacttagttttgatgatatattaggacaaacttttgctgtatatattttaacaatagcaggagctgaatctgcaataggtttagggatattagtagcatattatagattaagaggtagtataacaatacaatataaataaatgtatttaacattgataattttaccattaataggttcaataatatcaggtttctttggtagaaaagtaggtgtaacaggatcacatataataacatgtggttcagtaataactacaacacttttagctataatagctttttttgaagtaggttttaataatataccagtaacaataaatgtagctagatgattagatgtagaatcattatatgtattatgaaactttagatttgattcattaactgtatcaatgttaataccagtattaatagtatctagtttagttcatatatattctataagttacatgagtcatgatccacataatcaaagattttttagttacttaagtttattcacttttatgatgattatactagtaacaggaaataattatttagttatgtttgtaggttgagaaggtgtaggtatttgttcatatcttttagtaaatttctgatttactagaatagcagctaatcaaagctctttatcagctttattaactaatagagtaggtgattgtttattaactgtaggtatgtttacaataatatgatcttttggtaatctagattatagtacagtatttgcattagcaccttactataatgaaactataatcacaatagtgggaatatgtttattaataggtgctacagctaaaagttctcaagtaggtttacatatttgattacctcaagctatggaaggtcctacacctgtttctgctttaattcacgctgcaactatggttacagctggagtatatttattaatgagatcttcacctttaattgaatatagttcaactgttttggttttatgtttatgattaggtgctataactacagtatttagttctttaattggattattccaacaagatattaaaaaagttattgcctattctactatgagtcaattaggtatgatggttatagctataggtttatcaagttataatttagctttattccatttagttaatcacgctttttataaagcattattattcttaggagctggatcagttatacacgcagtagctgataatcaagattttagaaaatatggtggtttaagagagtttttacctttaacatattcagttatgttaatagcttcattaagtttagttgctgtacctttcatgacaggattctattctaaagattttattctagaatcttcttatggtcaattctatttatcaggtactatagtttattatgtagctactataggtgctatgtttactacactttattcagctaaggttttatatttaactttcttagctaatcctaatggacctctatctagttataaacatgctcatgaaggtgatattttcttaactttacctttaattatcttatctattttctctatattctttggttatttaactaaagatatttttataggtttaggttctggtttctttgtagataatagtttatttattcatcctagtcatgaaattatgttagatacagaatttgctgtaccaacattatttaaattattaccatttgtatttacagttagtttaagtattttttctgttttattatctgaattcttacctaaattacttattaactttaaattctcaagatttggttataatttatttagtttctttaatcaaaaattttatatagaattattctataataaatatattgtagaaggtgttcttaaattaggtggtcaaactactaaaagtttagataaaggttcagtagaattcttaggaccttatggtttagaaaaaggattattatctttaagtaatagtttaggtaaattaagtactggtgtaattactacttatgctctatatatattaataggtttaatgttctacatatcattagtatatttctcttataatgataataatttatttatattagttatatttactttgtttgcgttattaaataataatttaacttcaactaaataataatttaacatatagttaataataagttatcctttacttaataataagttattgtttatttaataataacttattattttttttttttttataataaatatctatagatatttattatttattttatttaatttaaatttatttatatttttattcagatatgcttttatcttcaatcttctgtttaatattatctaatgcattgtcttttagacgtgatacagctattctttattcaagaataggtattataatattattttactgtatttatttatgttataataatttatttataacatatttagataatggtatagggttgttcggtggtttattttatacatcacctataacacaaacatttcatatattaatatttattttaacattattaatattgaatttaactggtttttatcctagaaaacttatctctagtcagtatttaagtttatacaaattattatttacaaaattacaatttgttaaaaacattgctgtatctaatataattttaaaaaaaggagaacaatatacaatattggaatatacattaatgttattatttattgtaataggtagtctattattaatatctagtagtgattttgtatctatatttttatctatagaattacaaagttatggtttatatttattatgtactatgtatagaaattctgaatcagcaacatctgctggtttaacttattttttactaggtggattagcatcttgttttatattattaggtatagctttaatatatgcaaatttaggtgtaacatatttagatagtttctttgttataaataatttagcaggtgtattaaatgaacaacaaattactacttatgtaccatattgcttattattaataactataggattcttatttaaaatatcagctgcaccattccatttttgatcacctgatgtttatgatggaatacctactatagttactacttttgtagctcttatagctaaaatttctatattaattttattattacaattggttcattatacaaatagtgtatatattactacacaatatacttgaactactagtttcttaataagttcattattaggtttagtaattggttctgtattaggtttaacacaatttagaattaaaagattgtttgcttatagtactatatctcatttaggttttatgttattagcattagctattaatagtgttgaatctatacaatcatttattttctatttaactcaatatagtttatctaatttaaatgcattttttatattagtagctataggttatagtttatatgcttataatgataaaaatattaatcataataatttagtagataaaaataactcacctatacaacttataagtcaacttaaaggatatttccatattaatagttttttagctttaagtttctctattactttattctcatttgctggtattccacctttaatgggattctttgctaaacagatggtattctctgcagctttacaagaaggatttgtattcttaactcttataggagtattaactagtgttattagtgctgtatattacttatttatagtaaaaactatgttctttagtgaacattcttatacttattttagtagcttaaaagatttaagaatacctgctcttattacacaaaataataaagtagttaataaaatatattttgattctaaattttctttatctagttctttatctataactatttctatcttaacgttaattatacttttatttatgtttatgcctaatgaagcattacatttatctaatatattagctattgtattatttattcctgttaatatttaaaatattaataaaactttaattaaacaaacatacataaattaatattaatattatctagataataaaaaaaaaaaataaaaatatataattacaatatatatatatagatccataattacatttattaagaataggaattataatttcttttccggctgcatagcagtttttaattgaacaaacccatataaataaatatatatatatttatatttatttatatttatttatttatattaaaatatagcaaaataaaacataaaatagaacaataacaataaatataaaataaaaatatgagaattcttaaaagtcatcctttattaagattagtaaattcttacttaatcgacgcaccaacaccagccaatataagttatttatgaaactttggttcattattagcaatatgtttaataatacaaattgtaacaggagttacattagctatgcattatacacctagtgtagctgaagcatttaattctgttgaacacattatgagagatgtaaacaatggttgattaatacgttatttacacgctaacacagcttcagctttcttctttttagtatacctacacataggtagaggtttatactatggatcatataaatcaccaagaacattaacatgaattattggtacagtaatccttataataatgatggctacagctttcttaggttacgtacttccttatggtcaaatgagtttatgaggagcaactgttattactaatttaatgagtgctataccttgaataggtcaagatatagttgaatttatatgaggtggtttttcagttaataatgctacattaaacagattttttgcattacacttcttattacctttcgtattagctgcattagtattaatgcacttaatagcttaccacgatgtagtaggatcaggtaatcctttaggtatatcagctaattatgatagattacctttcgctccttacttcttatttaaagatttagttactatattcttattctttatagtattatctatatttgttttctttatgcctaatgcattaggagatagtgaaaattatgttgtggctaatcctatgcaaactccacctgctattgtaccagaatgatatttattacctttctatgctatattaagatctatacctaataaattattaggtgttatagctatgtttgctgctattttagctttattagctatgccattaacagatttatctaaattaagaggagtacaatttagacctttaagtaaaattgcattctttatatttgtagctaatttcttaatattaatgcaaataggtgctaaacacgttgaaacaccatttattgaagtaggacaaatatctactgtattatactttgcacacttctttattatagtacctgtagtaagtattatagaaaatagtttagtagagttagctactaaaaaataattagtatataataatattattattatacctattatatataattaatatttacaaattatatattattatacctattatatataattaatatttacaaattataggagtttgagtagaaggttctgcgtttcgattgcaaatcgaaataaagggattcgagttccccgaactccttagatatacatgtttgtatttagagtatactattctaaatcctattcaattagtttatatataatattaacctatatttttaattaaaatattagattatatatatatatattaaacataaaaagtttcaatgtataatgttgagtatatttattaaatatttatatatatagaataaaaactgcaggttgttaattacaattaatattaatataaatataaatattctattgatatatattgttataataaataataaatatataaatgataagtataatttcaattattgaagggttattattaatagtacctgctttactttcagttgcatttgtaactatagccgaacgtaaaactatggcttctatgcaaagaagattaggtcctaatgcagtaggttattatggtttactacaagcatttgctgatgctttaaaactattattaaaagagtatgtagctcctacacaagctaatattatattatttttcttaggacctatgataactttaatattttctttattaggttatttagttgtaccatttgatagtggtatttttgtatctgattatagtttaggtatgctttatatgttagctgtgtcatctttagctacatatggtatattattagcaggttgatctgctaattcaaaatatgcttttttaggttcattaagaagtacagctcagttaattagttatgagttaatattaagttctgtaattatattaattatcttattaacaggtaatttaaatattattactattgtagaatcacaaagaatagttgatttcatattaccattatttcctttatttattatattctttataggttctatagcagaaactaatagagctccttttgatttagctgaagctgaatcagaacttgttagtggttttatgacagaacattcagctagtgtatttgtattttttttcttagctgaatatgctagtattatattaatttgtgttttaaatagtattttattttttggtggttatttatgtattatacctgttgaatttataatagatatattatataatatatttggtattaatagttctatattacaagatatatttgttaatatttcttcatctcctttaaatttagcttttaaaactgctttattaatatttgtgtttatttgagttagagcatctttccctagaattcgttttgatcaattaatgtcagtttgttgaactgtactattacctttaattatagcatatgttgttttaataccttgtgttgtatttggtttagatgctttacctacaagtttaatactttaatttaatatttattattaatttatattactttaattctgttaatttagatataattatattattattaaattatataatcatatataaatttattatgtaacttatatatttcaatatagtatgtatgtatgtattataaaaaaaaataataattaattataatatagtattaactaatatatacttaagctttatagcatatataaggtgtaacaaaaacaaattaatgttttttttaagcagaaagtatatatatattctaaatttaatatgtccttattattattattaattccattgataggaataagtcttgtaactatagagactaattctggtttaagtatagtaaataatattaaaataaaatctatagccttaactacatcaataataaatttaattgtatcattaataatgtttatactttttgattttagtagtaaacaatttcaatttattgaagaacattaccaagtaagttattttgatatctatttaggtgtagatggtttatcaatatattttatattattaacaactataataatgcctgttgctattttatctaattgaaattcaatacaatctcaaaatgtattatcatttgtagtaattatgttattattagaatcattattattagctgtattcttagttttagatatattattattctatgttttttttgaaagtatattacctcctttatttttattaattggattatttggttcaagtaataaagtaagagctagtttctatttatttttatacactttaattggatcattgtttatgttattatctattatagttatgtcttctattatgggtactactgattttgatgcattatttaaagcaaactttagttatacaactcaattatttttattttacggtatatttatagcttttgctgtaaaaacaccagttatttttttaaatacttgattactaaaagctcacgttgaatcaccattatctggtagtattatattagcaggtatagttttaaaattaagtttatatggtatatttagaatatatagatccataattacatttattaagaataggaattataatttcttttccggctgcatagcagtttttaattgaacaaacccatataaataaatatatatatatttatatttatttatatttatttatttatattaaaatatagcaaaataaaacataaaatagaacaataacaataaatataaaataaaaatatgagaattcttaaaagtcatcctttattaagattagtaaattcttacttaatcgacgcaccaacaccagccaatataagttatttatgaaactttggttcattattagcaatatgtttaataatacaaattgtaacaggagttacattagctatgcattatacacctagtgtagctgaagcatttaattctgttgaacacattatgagagatgtaaacaatggttgattaatacgttatttacacgctaacacagcttcagctttcttctttttagtatacctacacataggtagaggtttatactatggatcatataaatcaccaagaacattaacatgaattattggtacagtaatccttataataatgatggctacagctttcttaggttacgtacttccttatggtcaaatgagtttatgaggagcaactgttattactaatttaatgagtgctataccttgaataggtcaagatatagttgaatttatatgaggtggtttttcagttaataatgctacattaaacagattttttgcattacacttcttattacctttcgtattagctgcattagtattaatgcacttaatagcttaccacgatgtagtaggatcaggtaatcctttaggtatatcagctaattatgatagattacctttcgctccttacttcttatttaaagatttagttactatattcttattctttatagtattatctatatttgttttctttatgcctaatgcattaggagatagtgaaaattatgttgtggctaatcctatgcaaactccacctgctattgtaccagaatgatatttattacctttctatgctatattaagatctatacctaataaattattaggtgttatagctatgtttgctgctattttagctttattagctatgccattaacagatttatctaaattaagaggagtacaatttagacctttaagtaaaattgcattctttatatttgtagctaatttcttaatattaatgcaaataggtgctaaacacgttgaaacaccatttattgaagtaggacaaatatctactgtattatactttgcacacttctttattatagtacctgtagtaagtattatagaaaatagtttagtagagttagctactaaaaaataattagtatataataatattattattatacctattatatataattaatatttacaaattatatattattatacctattatatataattaatatttacaaattataggagtttgagtagaaggttctgcgtttcgattgcaaatcgaaataaagggattcgagttccccgaactccttagatatacatgtttgtatttagagtatactattctaaatcctattcaattagtttatatataatattaacctatatttttaattaaaatattagattatatatatatatattaaacataaaaagtttcaatgtataatgttgagtatatttattaaatatttatatatatagaataaaaactgcaggttgttaattacaattaatattaatataaatataaatattctattgatatatattgttataataaataataaatatataaatgataagtataatttcaattattgaagggttattattaatagtacctgctttactttcagttgcatttgtaactatagccgaacgtaaaactatggcttctatgcaaagaagattaggtcctaatgcagtaggttattatggtttactacaagcatttgctgatgctttaaaactattattaaaagagtatgtagctcctacacaagctaatattatattatttttcttaggacctatgataactttaatattttctttattaggttatttagttgtaccatttgatagtggtatttttgtatctgattatagtttaggtatgctttatatgttagctgtgtcatctttagctacatatggtatattattagcaggttgatctgctaattcaaaatatgcttttttaggttcattaagaagtacagctcagttaattagttatgagttaatattaagttctgtaattatattaattatcttattaacaggtaatttaaatattattactattgtagaatcacaaagaatagttgatttcatattaccattatttcctttatttattatattctttataggttctatagcagaaactaatagagctccttttgatttagctgaagctgaatcagaacttgttagtggttttatgacagaacattcagctagtgtatttgtattttttttcttagctgaatatgctagtattatattaatttgtgttttaaatagtattttattttttggtggttatttatgtattatacctgttgaatttataatagatatattatataatatatttggtattaatagttctatattacaagatatatttgttaatatttcttcatctcctttaaatttagcttttaaaactgctttattaatatttgtgtttatttgagttagagcatctttccctagaattcgttttgatcaattaatgtcagtttgttgaactgtactattacctttaattatagcatatgttgttttaataccttgtgttgtatttggtttagatgctttacctacaagtttaatactttaatttaatatttattattaatttatattactttaattctgttaatttagatataattatattattattaaattatataatcatatataaatttattatgtaacttatatatttcaatatagtatgtatgtatgtattataaaaaaaaataataattaattataatatagtattaactaatatatacttaagctttatagcatatataaggtgtaacaaaaacaaattaatgttttttttaagcagaaagtatatatatattctaaatttaatatgtccttattattattattaattccattgataggaataagtcttgtaactatagagactaattctggtttaagtatagtaaataatattaaaataaaatctatagccttaactacatcaataataaatttaattgtatcattaataatgtttatactttttgattttagtagtaaacaatttcaatttattgaagaacattaccaagtaagttattttgatatctatttaggtgtagatggtttatcaatatattttatattattaacaactataataatgcctgttgctattttatctaattgaaattcaatacaatctcaaaatgtattatcatttgtagtaattatgttattattagaatcattattattagctgtattcttagttttagatatattattattctatgttttttttgaaagtatattacctcctttatttttattaattggattatttggttcaagtaataaagtaagagctagtttctatttatttttatacactttaattggatcattgtttatgttattatctattatagttatgtcttctattatgggtactactgattttgatgcattatttaaagcaaactttagttatacaactcaattatttttattttacggtatatttatagcttttgctgtaaaaacaccagttatttttttaaatacttgattactaaaagctcacgttgaatcaccattatctggtagtattatattagcaggtatagttttaaaattaagtttatatggtatatttagattaatgttacctttattacctaaagcttctttaaaccttacatatattatatatgtaataggtgtaataactataatctatgctagttttagtacattaagaacaatagatattaaagaattaattgcttactcttctgtatctcacgcagctgtatatttaataggtgcctttagtaatacaatacaaggtatagaaggttcaatagttttaggtttagctcacggttttgtatcaccaggattatttatttgtgctggaggtattttatacgatagatcttctactagattaattacatattatagaggtatagctcaaattatgcctgtattctctatattattctttatattatgtttaggtaatagtggtacacctttaactttaaatttcataggtgaatttatgtcattatatggtgcatttgaaagaatgcctatattaggtatactagctagtacttctattgtattatctgcagcttatacaatgtttatgtataatagaatagcttttggtggttcttattctgtatattttgtagaaaacataggtgatgttactagaagagaatttatattattattagtatttgtagtatttacagtattatttggtatatatcctgctcctatattagatggtttacattactcagtttcttctttaatttatagtataaattaatataatttatataatttatttattataataacatttattgttttgttttattcaattcaataattatgtttatttatcttcttactagctcaatggcagagccgaatacttctaatattttgatccaagttcgacccttgggtaagaattgtaataataatattattaatactattattattttagcctttatagctcaatggtagagcgagatactgttaatattttgatagatgttcgattcatcttaagggcttatttttaccttaccttataatctaaaaaaaaaagtcaagatatatattaagaaaatatccatataatagataaaatacaaatatatgccacaattagtaccattcttttttgtaaatcaagtagtatttacttttgttatattaacagtattaatatatacatttactaaattcatattacctagatttgtacgtacttttatttcacgtatttacataaataaattataattatataaattagtagttgtattatatatataactaaaacataataattttttattattatatatatctctatcttaatagagtttcattaggtaatgaaaacaataagttaatatttatatatatcttataaataaacaataatatgcgtcatttagattttgtattaagtccattagaccaatttgaagtaagagatttattttctcttaacgctaacttattaggtaatttacacttatcattaacaaatataggtttatatttatcaattagtatctttttaattttaacatatagcttattagctactaataataataaaataatacctaataactgatcaataagtcaagaaagtatatatgctacagtacacggtatagtagtaaatcaaattaatcctaataaaggacaaatgttctttccattaatgtatgtattattcatatttattttagtaaataatttaataggattagtaccatatagttttgcatctacatcacactttatattaacattctctattagttttactgttgttttaggtgcaactatattaggtttccaaagacatgggttaaaattcttctcattatttgtaccttcaggttgtcctttagctttattacctttattagttttaattgaatttatttcatatttatctagaaatgtttcattaggattaagattagcagctaacatataagatgagattaggccctcacacttttgtgtttaaagagccaaactccggggaagccctaaagctttaataactaaagataagacggaaacttcttatgcggcctcaataggagtttgagtagaaggttctgcgtttcgattgcaaatcgaaataaagggattcgagttccccgaactccttagatatacatgtttgtatttagagtatactattctaaatcctattcaattagtttatatataatattaacctatatttttaattaaaatattagattatatatatatatattaaacataaaaagtttcaatgtataatgttgagtatatttattaaatatttatatatatagaataaaaactgcaggttgttaattacaattaatattaatataaatataaatattctattgatatatattgttataataaataataaatatataaatgataagtataatttcaattattgaagggttattattaatagtacctgctttactttcagttgcatttgtaactatagccgaacgtaaaactatggcttctatgcaaagaagattaggtcctaatgcagtaggttattatggtttactacaagcatttgctgatgctttaaaactattattaaaagagtatgtagctcctacacaagctaatattatattatttttcttaggacctatgataactttaatattttctttattaggttatttagttgtaccatttgatagtggtatttttgtatctgattatagtttaggtatgctttatatgttagctgtgtcatctttagctacatatggtatattattagcaggttgatctgctaattcaaaatatgcttttttaggttcattaagaagtacagctcagttaattagttatgagttaatattaagttctgtaattatattaattatcttattaacaggtaatttaaatattattactattgtagaatcacaaagaatagttgatttcatattaccattatttcctttatttattatattctttataggttctatagcagaaactaatagagctccttttgatttagctgaagctgaatcagaacttgttagtggttttatgacagaacattcagctagtgtatttgtattttttttcttagctgaatatgctagtattatattaatttgtgttttaaatagtattttattttttggtggttatttatgtattatacctgttgaatttataatagatatattatataatatatttggtattaatagttctatattacaagatatatttgttaatatttcttcatctcctttaaatttagcttttaaaactgctttattaatatttgtgtttatttgagttagagcatctttccctagaattcgttttgatcaattaatgtcagtttgttgaactgtactattacctttaattatagcatatgttgttttaataccttgtgttgtatttggtttagatgctttacctacaagtttaatactttaatttaatatttattattaatttatattactttaattctgttaatttagatataattatattattattaaattatataatcatatataaatttattatgtaacttatatatttcaatatagtatgtatgtatgtattataaaaaaaaataataattaattataatatagtattaactaatatatacttaagctttatagcatatataaggtgtaacaaaaacaaattaatgttttttttaagcagaaagtatatatatattctaaatttaatatgtccttattattattattaattccattgataggaataagtcttgtaactatagagactaattctggtttaagtatagtaaataatattaaaataaaatctatagccttaactacatcaataataaatttaattgtatcattaataatgtttatactttttgattttagtagtaaacaatttcaatttattgaagaacattaccaagtaagttattttgatatctatttaggtgtagatggtttatcaatatattttatattattaacaactataataatgcctgttgctattttatctaattgaaattcaatacaatctcaaaatgtattatcatttgtagtaattatgttattattagaatcattattattagctgtattcttagttttagatatattattattctatgttttttttgaaagtatattacctcctttatttttattaattggattatttggttcaagtaataaagtaagagctagtttctatttatttttatacactttaattggatcattgtttatgttattatctattatagttatgtcttctattatgggtactactgattttgatgcattatttaaagcaaactttagttatacaactcaattatttttattttacggtatatttatagcttttgctgtaaaaacaccagttatttttttaaatacttgattactaaaagctcacgttgaatcaccattatctggtagtattatattagcaggtatagttttaaaattaagtttatatggtatatttagattaatgttacctttattacctaaagcttctttaaaccttacatatattatatatgtaataggtgtaataactataatctatgctagttttagtacattaagaacaatagatattaaagaattaattgcttactcttctgtatctcacgcagctgtatatttaataggtgcctttagtaatacaatacaaggtatagaaggttcaatagttttaggtttagctcacggttttgtatcaccaggattatttatttgtgctggaggtattttatacgatagatcttctactagattaattacatattatagaggtatagctcaaattatgcctgtattctctatattattctttatattatgtttaggtaatagtggtacacctttaactttaaatttcataggtgaatttatgtcattatatggtgcatttgaaagaatgcctatattaggtatactagctagtacttctattgtattatctgcagcttatacaatgtttatgtataatagaatagcttttggtggttcttattctgtatattttgtagaaaacataggtgatgttactagaagagaatttatattattattagtatttgtagtatttacagtattatttggtatatatcctgctcctatattagatggtttacattactcagtttcttctttaatttatagtataaattaatataatttatataatttatttattataataacatttattgttttgttttattcaattcaataattatgtttatttatcttcttactagctcaatggcagagccgaatacttctaatattttgatccaagttcgacccttgggtaagaattgtaataataatattattaatactattattattttagcctttatagctcaatggtagagcgagatactgttaatattttgatagatgttcgattcatcttaagggcttatttttaccttaccttataatctaaaaaaaaa

SEQ ID NO: 24 - DNA, 28217 bp, Penicillium roqueforti
  misc_feature (20956)..(21050): n is a, c, g, or t
  misc_feature (25454)..(26704): n is a, c, g, or t
cgggttgtatgtggtggcggctcgtatgtgaattacgttatatagattagtaactaggtactagttactaagaaaagtgaagctttcctctaagatagatagatcttagatactagatcgagctcttatatctataataatagggattagtttattaattttatactagaagttaactaggtaactactagagatagtttaataaaaatcctaggaactaggactattaggcttataggatagtatctagaaactagaaaaattaagattaaactaagtaatatactatattcgctaaccttctatataaacctagtattatatatagccctataaaggaaaggaggtttctagtactaatatactaactatatataggatcctaataatctccctatcattaatatatacctataggattattttaatctatagattttcaataagctagataagaaggtacccttataggtatatactataagaaccttagtaaagctataagaaataaaaagcttagtagatatctggtactaccgactcgcttatattaataagtatactatagcaaagcttactactatagtagatagtattattattaaaaaagaagaatctaaactagaggataaatctctatataaaatatactatattagcagagtactaaggtagatctctagatacctagttagctatatatttagataattcggaagggtatattttaatctaatatagttactactagtatataataagtactattagatctcctacttttatattaagggtctaagattctattagattataatatataagataaaactagaatactaattagctattaatcaattcgttaagctagtaaggaactaatagaagctactaattaaagctttctactataataataagctattagctagaaaaatattagaatatagcttaataagtaatagtatcttaatctactatactctacctagctatattaagataaatggttatatagaaaggtctagtagaatgattattacctatatataaatactcttaattaaaggaaagcttcctaaagatctatagctagaatttgtaagtatagctatctagttactaaactatatactattatatataactaataagaaccagtagatagtactataggaagaggtataaaaggaattcggtataagtttactaaggattaacctagctaatattaggttatatagaagcttagtatactactatattaagaagtaggtaaaatctaataagatagttccttaagtagagattagcttcctagtaggctatcttacctctaatatttataaaatctagttcctatatactagtaaagttagatatattagggatatagttattaataagacctataaatatatactaatatataagaggtattaatagatcctactaccgatagtagaggaactataagagcttattaataaagaaattatataagtacttaattataagattattagctagtaggtagctataatagatactactgagatatagtataactttaataatagcttctagtaagctactaaacctatcgaataactataggaagaaatataggataggatataagagggagaagggtagtaagagactaccctgaattaggggataagctatataataagcctactaatacctaattatctatttaaagccctattagatatatttctaaataaactagacctactactactactagttatactactagaagaagctaaactagatactagctctagttagagggtagatactatatataaaatatagtaagttaactagacctagctcctaaaaactagtaaactataaggataatctaaggataagctatataataaactagaaagatagctttaggctaagctactagtactaagtaggtagattataggagatattaataaaggtaatataataattagaaagtatatatatataaggaagaactttacttatactaccgcaatagtaaataaagagctactagccctcttatatatatttatagctagtctatatatagagaagctagatacttaatactatagagataatcttcctctactactaaagtactagaaagatattatattataccccttttaagaaggtttccttatagtaataagaaaagagattaactcccttactaaaaaaggaatatttaaagttattaataaactaaaggataggggaaagtaaatactacctctattataggtctttatatataaattcgactaagatagctatcttataaagtttaaagcctatatttatatataaggtaatctcgaaataatctcttaagaagaaaagagagctataatactagtagtaagaatagtaaggataatctttatactagttactacttttaatctagatctatactagcgagatactataacagccttcctaaatagtaaactagatagaaggaaagaaatatatatatatatactagagggattttagatccttagtaaatattagaagttattataagtattatatagtttatagatcttactataactttagtaataagaagtagtaagtatcttatataagttagggcttaagtaagtccctaaagatctatatatttttattagaaaaggactaattatcttcttctatatagataatatcctaatcgcctattatatattagtaagggatagggtatactaattagaaaaggatcttaaaacctattaggagcttatagattatagagaagctagttggtttcttaatatctaaattatataagatagatagtagaagaagctatagctatactaagatagctatatagtaagtattactacttactataatttaattaactacctagctatctatactctactataggtcgaagaactaaagctatactaaggtattactatacctagagaaatttatctctactagtagaaggtaggaatcttagctagctatataactattattactagactagatatagtaaaggccacggcctagctagcctaatttcttataaaccctagcctatagtactataaagtaatcaactaagttatttcttatctctatactacttataacctagtaattaaatatagcgctaatatagtaactactaagatagattctatataatttgtaagtaatacctcttatagagattacctagattagaaaagcttagtaggctatatttactaagtatatagagggctagttaactagaaagctactaagtagctaatagtaataatattaactactaaggctaagcttctaggcctatctaaggtcgggaagtagctctaatagtagtaataactactagatactattagctttatactatcttatactcttacaatcagctgcgataataagtatatagttaacctaatataaagcgaggatatagtatataagataaagctctgatatatagatatctattaccattagcttcgataagaggttaaggaaggacgaatttatataaagtgggttactatagcgaatatagtcgctgatagactaactaaggtactccctcgctagaagtataataacttcatcagaatgctaaggatggtagatataggccatctggtataggccagtaagtctatactaggcttactaagggggtgtgtcggagtatgtaagtcagtataccggaggataccggaggatctattaatcctaacaatgtgtattgtttattttagtttatgtaatcaggctctataaattgccagctgagctagttcagaaagacagactgattgacacctatttattggaccatatattttatggatatggttaatccgatagttatgagcccggtttacaccgaacgagactactagtgactaattgctatagaaagtgtcttacgaagccctattaaactatctattccttcctcccttaacgaagctatatagttagctatcacttactactactaatagaagtagtatcaatcctctccgctataaagggcgaaaaactgaaagatataccctaatagtatatctggtatactaaagtataactttatactacctaaaagaacgtctgggatctatataacccagataccccggtagatactaggcctactatccttactaaactagtagaaccagcctaccccttagataataacgataagaagctttgataagtttagtgagacttaatagacttatataagataaagtatactagataggagaaataggctaaaggattaagtaatataaacgaatatatccttacctatcttaatcctatataccatctctctatcctactatatataactctatataagagactagtctacctaaaagctcgcttcgctaagttaacagtatataaagaagagatccgaataaactagaagttattcgctatatagaagctaactagagatattaaataatagctctaaaagtagaacttactaagggagtaagctattagcctaggtattagtaatagcgatactaatagagacttcctatatatagttaaggaagtactactaatctagtagtaaggaaaatactaagaagtagttatagataagaagaaatataatacttaagatcttcttaaatctttctacgctataaactaggagattagggttaaaactattacctctactaatactctgaaaagtaccttctcgacttagtaaaggaatccagaagctaagctagataaagagaagtaagagaaggaaaagtaggagaacttagaagtagtcgaaactcccgtttaagtaacgaaggtatctatatagctataactacctaaaatatcgggtaataacctactagattataaataaagtggcttaactagagggttttatactaagtaaagataaactagaaaaggctaagaaggtattagctaaagatactacctagaagtaataggttaagaaaacggtagtagaagcttagataaaaccttagtaagctctttagtaagttcctctataagtagaagtaaagccttaataagtggtaaataccactatctagactagttttactatatttatatactatagtctataagctaacgtaattcacatacgagccgccaccacatacgacccgccaccccattcaataatcgtgaatttcactgatgccgggacccactagaattccgtcgcagcatattgatgatgctagcactttcttcatcgtgggtcatagctgccggtccactaagctgtcgccgagttatcgctaacaagtgacgtagcatcgcctttatagtggggactaatttaaaaaggacaatgctgggtcaacgtggaaaaatattttgactacggatatctccgtggcattttagcaatgtatgttcaagccgttcctagcgagcagagtttttctctcgggtttgttgctcaatgctatgcataatttctaccagtttctgtgcgtcgtctcgagtccgttccatcagctcattctgttcgctgatccattgcagtcgttccttccagaaatcccaccgctccttcgagaacgatgagtctcctttccatagattccaatcgggctttttgtttgcttcagcaagggtgaggtccttctttcctacaaacttgaaaataatggaccctgcaatctcaaaaaaaggaaccatagcatgaacatcagtctataggccgaagtcagtatctcaagcacagtgatcatattcttttgcgacccacattcagcataaggatgtaattcgtagccacgcggccatctacaaggtgatagcgctgtaagagcgacggcgagggcggcggaagtggcaccggcccgtgtttccacggctcctgttctaatgcaaagacggggattcgcaatgctatgcttagttcgcgtgaaccagggccatgcggtggatatgcggaaagataatgcgcgcaaaaagcgctgctactgtgaaaagtgtaccacccttcaaaagggtagataccgtatcgcatttcccagtaacctgtaatcagaatattagcccctacattaaatcaacataaacgaccctctggaaggaatcttgggcgaaagccttgtgtccaaaatattggagagaatcaaagaatgggatggccattttgcatgatattttaggggaagaagaagtcacgcacggtcatgagtctcttcccaaatgtccttgaatacggccaagttcctccagtcttccagccgatcctggaagcgtgacgtgcgaacctgttcttcggttctatcaaggtctggaagagctcttattgcctctaccagcttcaaaatagcgggttgatagttcggcatctcaatagcagcatcccaaagtagccatgaaacgcgctcccctttatccacagcttgactctggcgctcttgaatcaggtcatcttcgttacgaagtgacatgaagcgatgagcagcgtcatctactggaactgcattggcagtgccgtaacgctcaacaaattcctgcaatatttgaatctcatcccaggttgggggatctgggtcgccatcctctgggtctggatagaagaagggtttccattcggctttgtactcttccattgttgtgatggaagttgtggtgatttgatctggggtcgccccagtcggttctgacaacgaaggcgtactttcaagtgaaagtgcttaggaacagatcgctttttcggggcagtatggtcatacaagagacaagcaaaggaggcttcgctggtggtcagacctctggaatcctaagttgctccacaatggatgctcttagcacccatatagtgtcttatgtatgtatcagcgaaaaatgctggccaagaagcgctatagccaaagtagttaggggtggattcgaaaagagatttgaagagtatattcgatttcgaaatcattttgcgatgtcattattcgcattcgaaatttctattcgaaaagttatgcggaagtctgccaagaaattggttacgtaaatgattggttaacgccagcaaatccacccgtgatttagcgtcgtcttgtcgcgcacgttgtgtataccaaatcctccttacatatggatctcgtaatttgagactctagcctgtggatcttctcactatggttgatagcagtatttattttccgcctacaatagataacagctcatgtactctcagtgtcattccagctgtaggttggcgcaatacagtaaacacttccagccttcaagctatctgagcattttcccgggtccaaagaagggtttaccatcgtgaagaccgcatgtgtgatactatactgaccacatatacccacacaactatctccactcttggcctcgtaccatttgccacaattccttgttgttcctgtcgccagtgtcgcatttgcaggtggctcgaccttgctatacacatatccattcgattgagagggagcaacgccaccaccagtgctgcttccattgtgcatgccgccctgtggagagagacaaatggctgtaccgtagatcttgcttgctggctgtagattgtcgcagtcgtatgagacccatgggttgtatttgcgtacatcacgatctttcagggagtacgcgtactcgatatctgaacaattgtcgctgggttggatggaatatgtcttctcacaggttaggggaaggcagaatttgagtcccgaagagagggaactgcagtcaaggatctgattttgatttcccatgtacaatgccgctgaagaaatgctcgtgtcttcggcgatcgatgtgcaagtgtcgccgtccacggtggtgtagaaattatccgatccgcagaatttagtttccttttctggggtattgcgagggatttccaggactgtggtcggggcatttaatctgtaacgcttattgattgcttgtaggaccgtctgatagtagtcgtcgtacgcagagtaaggggtacattgcatcatttgaaggtgttcggtatagcagtaagagtatagctcgttatcaggcattgctatagtattagggactaaggtgaaatcatcaatgatatctgtcaacaccggttagatgagttgagtaataattagaggtgtttaacgtaccattgcaatacttccctgagctcttatccttgctgcatatttcgttataagcagcccaaatgcgactaccgaatatctctgcaggcgttctactgatgttatatccggtacagttaagttgcaccgattgatactatgcctggaggttctgactataagtcgtatcacaaatcgactcagtcagggtatcgttattcagagaaccgtgatatttggcggatattattgagttcaagactgggtcgcatttgatttgttccgttatcgccgactggtaaccgattggaagatcaagaggttccagtgtagaggtgctgtagatactaaacctgtcgaattctcttaggcccgcggtttgatttgcactaccaagccaagcaagaatagacgagagaagaccattcatgttatccttggcataagtgggtgttcccttgtaaggtgtgatcatctccacaatagccctagtgtaaagattatacacctaaatatcggtactttgtttaaccctgaaagcctattgctgatagtcattcgtttcgaggcagtcttgggagtaatccgaaaaccagctgtagataccagtgccaagtacctaaatagaggaggactcgacgatacgaataccctaagataccgcacacttggttgaatcactcttgcaatcatcaaaatttgggtcattgacaaacatgcctggtgtgaaggggactggggcttccggcgagggttggtaataaggcgattctgtctgaatcattcctatgagaatattctgcgcccccgaaagctggtactggtagagagtactgtgttccgatgtagtactataaagctatgccagttgactctcgattagaataccacgggctgcgtaaatatcaatctgatcttaggaagagacgtcaaggttatggtcagctacccagacccagatgttctccaggtaggctgtggaagataaagtcagatgaagtaaaagagatgcagcaatacaatcttcattgatacttcctgtgttctttggacactgtttgttctggaggttcgaccctatagcaccgctaatgcggatgtgagaatcccacatagcagccgatcccttcactgattgctcaacattccactctacaagaatcgcacctgccgtagggctagagactgtgaaaagtagatcttgaatttccactataccaacgttaccggaagcactgaccctaacggtaactcggggatcctctgcatctgcaaaattagtaccagttgccatgatctgagaccatgcctaacctataatgcgtgatccaacaggtacatgcaatatatcatgaatcatgtaaataccgtgtggaatgtatataatagacgaaagattcgcagcataagataaagtgtaattaagaatcgcagtatcatccgtagtcccgtcgcccttggctccaaggttcttaacattgacgatttggtcggctgcgagagtcttgtattgaggtcgacgacgagtgaagaggttagagtcaatataggcttgtgtccctagtagctgagtcggtcgcaaaatagcagggatatcctcaccattagcaaaggatctaactccagatacatcgctgaccattccgaaaccccatgaagctttgcggacctcattactaccagtaagaagaattttattctgaacggaatcaatgattgcggtcttgacgttgaagaatccgacattttgcaacaacagagaagtcgaattttccgcatgaagtgaggttatgattccattcggggtattggcgatgatggcatcagtcaagatgagagatccaacaccttggcctatactcgaaggtcctccggcctatctagattagcatgacttgccaaatgccattcagctattttgtctatgactcactccacccacaattgtgagtccatttgtgcaagattcaataacgtagtcctgcatggtctacgcccaatcccaatgaacctgaagagcggtgttgcagttcacgaaggtgagctgacttgaagtgaactgttggttaccaaagtaagcactatgcataattaattagaccccattgatattcaaactgcacaagaatgtcattacccaaagttgcctcccacaaacgtaaggtcagctagaaagcctccagatccattctccatgtagattccttattgcgtgttcgacggaacatctgaattgtataccatgtaaaattctatgttttccagcgacgtcccttgcgcaacttgccagtggatagcacagatgtatgccgaggggtcagttggtctgatgtcgattttgaagtttctaacgctgcgcaagaagttgttttgattaatataccactcttcattgtcactgacatagacatcggaggtaatgacgcccaggccaacgaaactggatgcagccaggatggtaggaacttcgaggggctggtggctgtcagtgattaaacagcacaagcatgcagaacaatcgctcagcagcattgctcgaagaaacttacatcacccaaaaactcagtattatagtactgaatgattggcgagctaaccaggtatgttccggcaggaaaccagactgtcgcagggtagatagtacttgatccacagccgaggccgcagcgtccaccgtccgagatagccttgttgatggcctctgtatcgtctgtgacaccatctccgacggctccatactcgcgaacatctctccatacctattttgcgtcaaacttaaggaaattaatgagaggggaagagggcgggtactttataaccagctggagcaaatgcactttttccattttgttccatcgtagccatccagtacttcgaagtactagctcgcttttggattgctccatgggttgtatcattgccaaacacgatgtcatcggtagtaccggtcgataaaaagtcactcagaccattcgaatgtaccaaggcctggcttggggcattggtatccctgcgaccctttccgtacttattgcgaatctgggaagccacgagactgtgatttccagtcggcttgtttggagttgactcggcgacaattcgagctgcgcgggccagctcagtcgggattgaatatgccttgtttccgctggacggggtagctgttgcgtcacggtggatgagatgaggactttcaactgctttaggactatagcccagaggcgtggcagccaatttggagttcttttttgctccctgtgatttatcaaacgccaaattattaaaattggggttcgatgttcgatctttgttgacttttgcgagagctgccaaagcatctttcactatagtcgcggcatcattgctggtaacgttaccatgactccggtggtgaagacttgtatggcggtggtgaatattatgatctgccgatgcgcaagctgcgaagacaaaggcaattgtcaagctgaagatcagacccaccgatcgcagctgatgaaccgccgatctcctgttgagcttcatcttgccagcaacattcagaaactcgatgctgaagggatatgacttttgggctttctgtgagcgagaatccggtcatatgcgattttagtctaggctcactttcgtcggttctcttattctgggggccgaaaaaaagccagaagcaatttccgcgatgcgaccataaatctactagtttgatcgcggacccttcggagatgcccgtgccaagccggccaagacctgccaaaagcgcacaaagtagggtccgatctccactttcagttcttagttccgccctaaagcatgtcgggaccaaacgatctcatcgtcaacctcacaagggccttggctagttgattcggtgtctcagttgcattcctcgccgctatcgttattttcttggcaaatgcgctattgactaccatttcatcgctaccaaaatatgaaacatgttcctacgaaaatgtcggtcgttagcgagtggtcccaatatttaccttcggctagatccttccgaagtgggaaaacaaggtaggccattggtgagaagtatacgctagatggaagcgaatcggggggccaaaatatcctcatgcaacatcatttcatttagtccggtggcgacccgggggcagcagatcttggctaatataattttgataaaacagaacggagaatcatattgccttaatgagctcccagctagacttgatacccaccaagagataatatcctccagtatctctcctgctatgctgggttcgttcagccagaaatgatcaccgtacgcccaactggaggagccctcctttggctccttttgatctccttctgctttatatttaccagtgccaatgcacaagattgcagtgctttgaacacatgcgctactggatgctgcaacaaaggcggatactgcggaatcggtgatgattactgcggttccgactgcgttgcgaattgtgattacgagccagaatgcagtgtctcgaagccctgtgcaagtggatgttgcaacagctatggctattgtggtctgggaccagactgtgagtttctcaatcctctaaaacctagttaccgtgtctttctagagcatatttctgacatgaaatttcagtttgtgccgataaggtttgcgtgggaaactgcgacagcaaggcagagtgcgatcccggcaaatatggtgactatgcggaatcttccaaatgtccattgaatgtctgctgctcgaagttcggcttctgcggcactaccgaagaattttgtggcaagacaaaagtcaagcgcccttcctgtgacaaagatggatctctcaatcgagtcgtagggtactacgagggttggagtccttcacgtcgctgtaatacgttctaccccgaacaaatccctgtgggcatctatatacacttgaattatgctttcgcgtcgatcgatccagatacattcgagatcgtcgcggccaccgagagcgagaaaaagctgatgacgcgcttgacggatcttaagaaggtcgatcccgatctcaaagtcttcattgccgttggtggctggactttcaatgatcctggagccacccaaactctgttctcggatctcgctgcgtcggaaagcaatcagaagaagttcttcaagtccctccagagtttcatgtctatatacgactttgatgggattgatcttgactgggagtatcccgtggcggatgaccgtggcggtcaaaagaaagatttcgacaacttccccaagttcttggccaatttgaagaaatcccttaagtctactggtggccgcgatggagtcagcattacactgcccgcttcttattggtatcttcaacattttgatatcgcaaacctacaaaaacacgtcgacttcttcaacatcatgacctatgatatgcatggaaaatgggacttgggcagtgaatgggtttcccctatgctcgactctcataccaacctaacagagattaccaatgctctcgatttgctctggcgaaacgacatcaagtctgataaggtcgtcctgggtcttgtattctacgctcgagtattcactgctgctgacccgagctgcatggagcctggttgtttgtttgtttccggtggaaacgctgggaaatgcagtcaagaagttggcatcttactgaattctgaaattatggacatcatggataagcagtccctacagtccacgctggataaggaggctgccgtgaagattctcaaatttgacgacaaccagtggcttacctacgaaaattcagacacatttaagctgaaagccgactttgcccgaagccaatgccttggtggtgtgatggtgtgggcggtttcccatgatttaccccaaggtaacttttcccgagcccttggagatgccgtgggcagaagtgaagtcccttgtcaacagcggtgaattagcgtcaatggaggtcaaaaagacccatccgcagtgcaagtggacgaattgcttcgacgattgccctagtggatggtcgcgggttcgccgtacagatgacggtgcccgtgaaggcgagcacatgtgggattctaccgcatgtagttttggacagcatacgttctgctgccctcctgatgccgaacttcccaaatgtggatggtatacccataacaatggtaaatgcaattcggagtgtccttctggctacactgagattggatccaacatacaatactgttctaacgactttaacgactaccaagctgcttgttgtacaactgaaactcccagtatgaaactttactccaagtgtgactgggcgggaaaaccacggaaatgcgacgaggaatgccctagtggcaagtccgaggtggctctgtcaactaccggcagtggtggtgtatactgcgacgttacttctttcaaatacacaatgaacggccaagagggcacaagttgggaggaacgcagctactgctgtagtgaggaagacgatgttgaatggagtaaatgcgaatggcgtgatgacattggcctgatgctcgacaaaagctatgttgacggttactgtctccccggctgtccggatgaatacgtgcgtgtcgctattgatcaacacggtggtggttgcaaaggcgacggtggccgagccaaatgctgcttgccaaaatattcaacagtcagcaagagatcatacaccacgcgggaacagagtcttgatgacttggttaaagggttcatggatgatccgagttgtggagcggacgattacaacttgaagagggatctcgcgggctttgaatattctgtgggaaatacctctttgtccgatctgtctggtactcgaactccaacaacacttcaacgccgctcaacaaccaaacagctagatcctatctatactgttgcatacgcccttgctgtgcagtttacagttaatgcagcctacgaagagatctggaaaaaacgtgtgctgccatcatacccacatcttacagtcaaggctattcgcaattacctgactacgtctgaggactgggctgaaggaggtataagttataaactagagaaggttctttgcgccccaagcatcttcgacagcaagtttgcagaaagaagcattgtctcctgcgcatgcgaaacaagcgattgctgcgatgcaaacgatccggattcctgttcggatcttgacggtgatgatgatgattctactgctcttagcaaaagagttttagataagagagcctcgcgaacgttcgatgtcgatttatcagacggtggagcgcatgctacgatcacttcttggacggtattaatcttcaagtcccaatcaacgtatttttagtgctaatcagacgatcagtatatcgtgcgtggcaacattcgaggaaataatcccatcttggatgaaggttatacctacgatgacgctgaggactgcctcaatactcaaatcgctttgatgtcagtttcgatggcgaatatcggaagatatcagggtacgttcttggtgaccttgtttaccctgaaagtttactcaatttactaattaatcaagtcgaacatgtcgttgagttgaacaccgttgcctttttcctgagagatgcagccaatggggtcctcaggtctggtggtgtgatgagactcggtcgaatttcagtgaccttcgttagacaggctctgatggcgccagttcttaccaacccaccagtaatgactggtgccgaccaatccttgactcccatgacccggattatgcatgctttgggtagcctgaacaaccaagctgatttcaaccttttgcttaatcgtttgaacaacttaaaatccagggtatttgatcatttacaattttttttttctggagatgaccaagttacttatcatttcttttctctagctctggctttcaaaaacactcatccttgatgaaaaaatggagaaagcaatctcagccgatgacccgaatcgcgcattgatacatctccgcgagcccctcactattatttcctatctcaaccatctcagaatccagcctgacatgatcgacacttttaacacaattcacgtagaattcggtcgagcagatacgtactgggtgaatgctggacatccaaacccgcagtcgcaagccagatgggatgaatgggttcctgacttattagatagtgccactcagaatgttcgcacgtttgttgaaaattggggggatcagatgtataggttttgggcagtccggactggtgataacgttgcgcaaacgctcgagatcattatgactttgcgaagacaggctaaaactgcgaggattaatccgaatggcctggattgaaaatatcaaatgactagttatatacaagatgtagttagaagaaaaatgaactgaatttatttgagcagtgggacatgcaattcaacctctcatctttcacccatttgtagcaccctccatatctaaagcagttggtggcgtatatactgaattgagtagctcaattcaccgaatcaggaatctctcttgcgactgacttagtgctttattggtggctgtacggccttttccatttgacctgccctgatgccggctccggagctttcaccttgacacgccaaaatgagaggctgcggcctgaatactattaaattggcctaatttataagctttgagggcatccaaaaaaaggatctcttcttgttcggagaaaatcgggattgttttggtggtaaaaggggctcttggaaccgactctgcaggttcttcaaacactgcaactagggaagctccgtgacctgcgtatcttatgcagttttggttcgtagttctaagtattcgtcttacgccactacacagaaagaagaaatagaagtcaaacagattaggcagaattcaacgcaatataataacatttaacgaaaattctgtcttttctataacttttgatattcatataaatcttcctctcttcgtatacgcttcggaacccgcccagatatacgcctgtgggcacagcttttctttgaaagaggtatcctgtcttgttcaataagcagggtactaggtatggctgttgctgttggttcgattcttggtctcttgccaaggacactctcgtcggttagctgattccgctcaaatgttgtatcagggtagtcctcttcctcctcctcattatcgctcatcagatcgaacacttccttttcataactatgaccttgccaagtcgatttgcccgcaaacgactctggtgccccctaagcccccaaggtcactagtagatctcagcatctccagtcagggtctaacggtccctttaatggacagaatagattacctaggtaaattcttggataaacaagatccagaaaacactgaaagagttgaaccaacaaatagaagcttccgaagatattagcatgctggttggcttttgtttctcaaccttagaaaagggaagacttcgctacaacattaagaaaactcaaagctaatcaacagaaagccccaaacaattggcgaggtactgcgcactccgcactccgtacactagggcaaactcaaagattgtcttggtaaactcggttggggtttcaaatgttggcttggcagcacgtgtttggagactcggactttccctcctctcttctccactccctcaaatttcacgcgaacatcagttcaacatggacgagctccaaaatagccttggcacttacccagactggggatatgtcatctatcgcactacctactctgctgaatcggaaactctattcccagtcgctatcaggtacattgaagcctgtattaagagatcattcctccgagaccacaaagaagatcctacaaataaacccaacgaaatttgcgccaaataccggtcgactattgtgcaagatcccgcggaattcaatggggcgtctctcgaggcaattcgcgctcattttgaagcgtgggtggaatctcaaggcatgcgtgaccgctggaccaaatggcgaatgtgcatgattattgatgaagaatctctgcaaacactgaaaggtacatcagcagaggcccttgaaaatgagagcccataccattccgatgatgagctacgatgtgtaaaggttcttgaagcattcccggaaacagatcagtatgacacctttccggggtggatgagatgttggacacggtgtctttgggatctctggatgatgatgggagatgctagtgagatgaggcagttatttgacggcattgatgattttccatttgagggggtgtactgcggataattcaaagctgtttcggtctatggcattagagatatgtgattctcaggttgtggaaaatattgttcgacgggcagtcaaataaagaagaaacacatttttcattcattgatcgcgataatatatgattacaacataaggcccactgtgattgcaatccacatgtttaaggtaaacaggagtacgaacagtagctacattcgtcaaagaagatacgggatcggacattgataccgattagttgggaggcttgcaggtttctgtcaaatttaagaactctatccttttttctttgcttggctgttttcacctcgagtaaacgtccaccctccctgtcttcagtagcagtccggccctccaatgtagccctacacaatagtgatgcaccataaacgccatcaagttacacgtcacgcttataagccggtggctccaggaactagccaaagttccccggagcaaagtattgttcctggaggatgtttagctcccagagctggcctatacgttcctgaagtcgatagggcctgtgtataaaactgtctctcaaatcctttgactcgtccttgaaggaagtcgatcccagagacagccccattggcttcaggaatgtacaagctgaccctgggagcttgtggatacacacattgatgaatacaaactcttttgattctccgttcccgggcgctttcccttattattcggtcttatagtccctgtatgtggcaagccgtttcgtgccgccagggaataccttgaaactgctaagccagaggcatgctttcaatgcttcgcaagtgaagggcttccggacaaggttcgctttcagatgtttcataaccccgggtatgttgcgccacttcgatactattcaccttaaagaggaaccactcaaatgcaactggtatgaagtaggcttgctacatcgaatggcttcctagcgctatgcttctgatatacatcacgtgcggagtcgctggccatgctcgaatccgatgcagggacttcaaaaataagaatagatcggctataaatcaacgaagccattgtctcggtatcggaactacctgtgtgaagcagcacaaggatccaaatgttaggtaggagtctgtgataaaagaccgctctttattaattctcgggattggcctgatagcttgggaagtggattctaagtctgtcttcgaaccaacgaagtccctgtacccgactcagcacttaatgttttatatatgctatttcagttttgtgcaatctaatcgggttgcatatatatatacgataaatcacgtaaagtagtgtccaattgtctcttagcagtagcctactcgaactgttggctctcgggtatataatgagccttgtgccctaactctggcttagtcagacttctactttcctcctacctggtcaacctagtacctaggtatacgtctcttcttttcaagccacgataaccagtccgttaatgtgagacccctaggtatggaatgcctaagggaatgctgtatgtaacggaggatcgggaaatagagatagtgatatacgcagtggtatattggaactaatagctgcttctctaaagaagcagcatgcgaggataatatacaggtttgtgggtcatatgacctaaggaggctgtgcaggcagtacgcattactcctgtctagtctatagtcccctacgcacctaggataggtactccacgtactatgataggtattatatttcaggtatcagccttcttagtattggggtcctgataatatccccctccttgtggtatacggtccccgtaggcttagaataggagaagaacaaaggagtagcttagtctattaaaacccatatatctaaaaaacctcgcagtaagggtaaaaaggtatatagggaaaggtatctagcctcaatactccaaaaatatagaaaatgatataatagaagtataaacagagggtatagttgtgagacccctaggtatggaatgcctaagggaatgctgtatgtaatagaggattgggaaatagagatagtgatatacgtagggtatattggaactaatagctgcttctctaaagaagtagtatatgaggataatatataggtttgtgggttatatgacctaaggaggctgtataggtagtacgtattactcctatctagtctacagtcccctatatacctaggataggtactctacgccctataatagtatgagacccctaggtatggaatgcctaagggaatgctgtatgtaatagaggattgggaaatagagatagtgatatacgtagggtatattggaactaatagctgcttctctaaagaagcagtatataaggataatatataggtttatgggttatataacctaaggaggctgtataggtagtatatattactcctatccagcctatagtcccctatatacctaggataggtactctataccctataatagggcttataccttaggtatcagccttcttagtactagggtcctaataatatccccctccttatannnnnnnnnnnnnnnnnnnnnnnnnnnnnnnnnnnnnnnnnnnnnnnnnnnnnnnnnnnnnnnnnnnnnnnnnnnnnnnnnnnnnnnnnnnnnnngttatttactcgcgatttctaggttataaaagtaatctctaactatagtatttacttttagttataacctttactattataattaatcctatagtaaaacctatcttatcgaagttataaatattatctagattaattctatactaaagaatggttttttaaactagattaaactactctctaataatccttaggtctttatatttcgtatacttataattataatatcttaagaatcgggatataagggtagggtactgtttaataaaatatataacctatgttatatgccaagtcgtttaaggaaagagtgcatttgtgtcaaaattctaagtataaggagagaagaagaaaagggaaaactatctacgagggcgttcctccttcttatatccttcctgtttgcttgtttgcttccagtgcaaaagctcgtttgcccttctgagaaggaataagggaagtcgctcctacctagatcgttatataacccccagctaagaatacatttagtccctaaatacaggctttctattattaacgtggttatctaatattctgtcttcttccgctaccttgatctattcctatagttatattagcggtcctggttttgctaggtaggccttatggaattccttgatcttatctggtatattccggaagttacctactagatactattatagatctaggttgtgtcctagctattaaaccctatactataatttctagtagtaagtcctaacgttaaggattttttctacctcctacttattagttttaccgatttatactagtagcggtaggtctagatgctgtcctagtaacagctctgttgttactactttctaaagcttacttagatagaaaatcgggtaaaccttaatagattccggaagtttaaggtaataagaatatcctactttcttaatgatcttataaggactacttgctaaataggagagctttcaactaggctagtcttactgctaatcctttattgttataaatacagaatcgcctatattaaaatccttttcttagcgatatttatttacttattagatctataactgctaagactttttaatctgattttttatctctgtctagatatcctaaaggtaggatagtatatctattacttcttacttattctaggttaaagtctctcggtccttctaatcgaaagatatagtaggtttatagcctctttcgataaagaatagggacttcttagttatatcttaagggagtattaatactataaaatctactattagtaggtattctaactaattgtcctagttctattctacgtagggttataatcgctgtactatatactagttagtaatttcactttatctatttatctaagggtaatatacagtcgataactttctttttatacctaggattcgatagaacttagtctagaattctaagataaattaacctccttaatcagagataattatatttaggattcctataatctaaataatataatctataaataggcgtactatagcttttatatctatttccttctaataaggaattaatactagttgcttacttaaacggtctactactataaatatagtattatacctatagcaatcttttaggaaggatctaaaatctattgtaatatattactatagttgttctagtactagtaggagatatagtagtcttagagtacaatctctctatacctttattcttttataaatcaagtagttatcgatataatacttaatatctgttacctatcctagctaataatatcgttctaatactaatttctttagcttcttaattcctaggtatataattaacggctgttaatatatcttattaagaagccttatacgaagatctcctttattaggaaccttaagttagttcttaaaaagtaatagtctattataaagcgtctactttagattacttccttcgatagctatctatcggaatggtttaaatttagtattttactagttagcttattttacgcggtttataatcttaggatcttctagttcgatcggtaagagctctataggatatatacctttcttaaggtattttttaggaagtatagtaaactatcgactttagtctatatagggtaactccttctaggagagtatattagtaataatattcttctttcctagtcgatacttaataataaagtagaactataagaggaactcgctctactaggcctactgctaatttatctgtcttatagttataaagtattctaaggattaataatctataatgatttcgaaacgctcctttctagagaggccttctagctctagttactactcttataaggtatagataatagctaataactccttatcctatactttatagttaagtttagcggcttatattatttttaagaagaaagctataggatactaaaagttattgttattatagtactgtattaggactactcctaagaccctattcgaggtatctgtttccacttaggtatagagttttagattataatagtgtaggattagagcctcgactaggcttttttttaacttttagaaagtatctttatattatagtgactaatagtagactatatctctttaagttaggtagtagagtggcttagaaatagtactatatccttagataaattgtctgtagaagttatagaatctaaggaaggattagactccctttactattatagatatcttctattactagattatatagatctttttaggatcgatagctattccttctatattaacaataaatcctaagaacttagtcttagttatagagaatttatacttaggtaatataacctatagacctactttctagagttaggagaatacttctcaaatatacctctaatattcctctatagtatcactatagataaggatattatctataaataccatagtatacttatctatatattcctagagtatattatttataaaatactagaaggttattagcctatttattaatctaaagggtataaccttatatttaaaagatctatattatatatagaaagttgtaagatcttctactctaggagttaactagattcagtaaaatccttaatagatatccagctttataaagaacttagctttactagttctttatagtactttattaattagaggtagaggataataatccttctttaaaatactatttagttatcggaaatctatatagaattgtagacctcctttaggcttctttactataaggataggcgaagcgtagggggtagagctaggtataataaatcccttcttaaggttatctataatatactacttagtagcttttaacttattaaataataacttataaagagggtaatatcctggttatatctctgctttaaggataatattgtggtctacccctatataataaggtaggagtttatcggatttttgcttagagaagacttctataaggttatagtattcctataggagagttcttttaatttctttaacctctatatcctagactatcgttaatttaatattaagaatataatcgatttctataagagaagttaagaatactttaactccctttttagtatttatctttatatatagtcgattaaatcctactctgctaataatacttatattaattagtaagagtgtctcccttagttctttttcttaagtctactagactaggatagggggtatcttattattaaggttctatattatcttccgctactccttaacttactagcggctatactaataaatgtaggcttatagatagggcttttaggtttctagatcttattgaggtttattaaagaagtagtcttatctctcaatatttacttagtaatctttgtttattaccttattccttcttagaatctaagtagatattagtatagtaagtttacttactactttatcgaaaagtgttccctattatagctagattattcgataataataacagttaagtagaatgttatattctgtaaactatattcttcctagtattaaattatactatcctaggtctataactaatattagaacttattattagatccttctatcgatatttaatataagtataatagtgtaggtaattaggtatactagttttctattaaatcctctaactaggtacttctaacttagcttatatatatatagactaaatttctttctaagtaatacgataagggtaatattaataaagatagatctgtctgctcttatatctactaatactttaattgaaaaggaacatctattatatattaagtttatattaaaaactaaactatttcctagacttcctaaaagtttctatagattaagggcnnnnnnnnnnnnnnnnnnnnnnnnnnnnnnnnnnnnnnnnnnnnnnnnnnnnnnnnnnnnnnnnnnnnnnnnnnnnnnnnnnnnnnnnnnnnnnnnnnnnnnnnnnnnnnnnnnnnnnnnnnnnnnnnnnnnnnnnnnnnnnnnnnnnnnnnnnnnnnnnnnnnnnnnnnnnnnnnnnnnnnnnnnnnnnnnnnnnnnnnnnnnnnnnnnnnnnnnnnnnnnnnnnnnnnnnnnnnnnnnnnnnnnnnnnnnnnnnnnnnnnnnnnnnnnnnnnnnnnnnnnnnnnnnnnnnnnnnnnnnnnnnnnnnnnnnnnnnnnnnnnnnnnnnnnnnnnnnnnnnnnnnnnnnnnnnnnnnnnnnnnnnnnnnnnnnnnnnnnnnnnnnnnnnnnnnnnnnnnnnnnnnnnnnnnnnnnnnnnnnnnnnnnnnnnnnnnnnnnnnnnnnnnnnnnnnnnnnnnnnnnnnnnnnnnnnnnnnnnnnnnnnnnnnnnnnnnnnnnnnnnnnnnnnnnnnnnnnnnnnnnnnnnnnnnnnnnnnnnnnnnnnnnnnnnnnnnnnnnnnnnnnnnnnnnnnnnnnnnnnnnnnnnnnnnnnnnnnnnnnnnnnnnnnnnnnnnnnnnnnnnnnnnnnnnnnnnnnnnnnnnnnnnnnnnnnnnnnnnnnnnnnnnnnnnnnnnnnnnnnnnnnnnnnnnnnnnnnnnnnnnnnnnnnnnnnnnnnnnnnnnnnnnnnnnnnnnnnnnnnnnnnnnnnnnnnnnnnnnnnnnnnnnnnnnnnnnnnnnnnnnnnnnnnnnnnnnnnnnnnnnnnnnnnnnnnnnnnnnnnnnnnnnnnnnnnnnnnnnnnnnnnnnnnnnnnnnnnnnnnnnnnnnnnnnnnnnnnnnnnnnnnnnnnnnnnnnnnnnnnnnnnnnnnnnnnnnnnnnnnnnnnnnnnnnnnnnnnnnnnnnnnnnnnnnnnnnnnnnnnnnnnnnnnnnnnnnnnnnnnnnnnnnnnnnnnnnnnnnnnnnnnnnnnnnnnnnnnnnnnnnnnnnnnnnnnnnnnnnnnnnnnnnnnnnnnnnnnnnnnnnnnnnnnnnnnnnnnnnnnnnnnnnnnnnnnnnnnnnnnnnnnnnnnnnnnnnnnnnnnnnnnnnnnnnnnnnnnnnnnnnnnnnnnnnnnnnnnnnnnnnnnnnnnnnnnnnnnnnnnnnnnnnnnnnnnnnnnnnnnnnnnnnnnnnnnnnnnnnnnnnnnnnnnnnnnnnnnnnnnnnnnnnnnnnntatcaaaattctaagtataaggagagaagaagaaaagggaaaactatctataagggcgttcctccttcttatatccttcctgtttgcttatttgcttccagtgcaaaagctcgtttgtccttctgagaaggaatgagggaagtcgctcctgcctagatcgtcatatatcctagtatcttcttctcttctttaacctcttatcttacttaatctataagtatatctagttcgtttttttattaaaattctattaatttaatagtacttctattaggataaaactattctagttaggatactactattagttaatagatatatttaaatttagtagtattatattctatatagtatactaagaaattttaatattatatctaccccttccttataggaaatggccttatttttaggtttatatactaactatatttatagaatagtaatagtatattattatcctatactaccctcctctaaggaggataaaactctatatctataggtatagcgctattatatattaggctactagcctataactctactactttacctaataacccctaagcctattaaggaaccactatcttattagtagtactttttctaattataaagctatctaaactataagtataagacccttataggttatactaaatatacttactatactttagtaaagtatagttatatccctataagttaactatattattatagggaggaatctattactaataataatatagcttcctattaaggtttaatctactacctatactactcttaatatattacctatatctacttatatatcctaagtatatattattaagtaaagtattaagcgcttaacctatatagctaataaggctaaaaaggctactactattatagaagctatagaggttatagtagttactaaagttattatagtcctagaaattataaaaaatataggggatatctctaaagttaaagaattctttaatatccttactagtttagtagaggaaagtatagttcctaatataggtatacctagtaatactttatttatccctataaacttaacccctatctcttaggataccctaattatagagtctattttactattctatagtatttttaatactatcctattagtatttaagtctagctaggtatactaaccttacctatacctatatataaatcctattaagtatagggaatatagtactaatttttaatctataattaaagcttcttatattttaaatatatattcttagtccttatcttctttagtatctttataactatatttaacctagctttatagttattaagggccttagtctctttaactatagactacagttcttaggttactttaatattattatagttatactacttaactaagtaggacttattcttcttatcttaataggataggatatattcgatcttatactttacctaattattaatcttaattagtttaggagtattattatta

SEQ ID NO: 25 - DNA, 26200 bp, Penicillium roqueforti
  misc_feature (2691)..(3437): n is a, c, g, or t
  misc_feature (12541)..(13687): n is a, c, g, or t
acgatcaactctaaggatcaactccgaggattaactcagataatcaactccgaggatcaactcagataatcaactccgaggatcaactccaaggatcaactcagaggattaattcagacgattaactcagacgattaactcagacgattaactcagaggaatatcttattagtaaacgaactagcctaagtacctatttaacctgtgacttttgctaatgcttttgcgattcctaccaagtccttttccccgagtgtaattaatgcaaactcggggggaagcgtcttcctgttcctaggaattattagctataccccaaaaccattgatcaaaaatacttactttaaagcccatttttttatattccgcatcctatccttgcaatcgaccggcgttcgcatttccagttgcggatcctccgactcatcatcaagctgcttaatatacgcccaacgcatagggaacttcatccatagccggatcaaccgagcagtttccgcttcttcccatcgtactttcattcgcgagggaccatgcgattgcattcgcgagggaccatgctgttgttctctccctaattctaataactcctggatccgcttttcttcatagacttcgcgctcttccgcaaatgaaggaccatgtcgagatccatatgctacttccctaattacagtccccgcaaagtgactcgggtcacaactttccgatcgtgaggtatcgcgaccagtgccttgttgggtgtcacgaggtcctgagtaccgacctcgtaaagggtgctcctcgatactatggaacacttcctcttcgcctagtatctctgagtctggaagactttgctgtcgatactggctattcccccgtgtaggaggagggcttgaaggaatggcggatgacataccccatatactctcgtcatcacctttattagatggttgctgacgttgaatataactgaagtctcgcgatgttcgcgccctctgtggtgtatgacgagacgaaaagtcgaggtctgaggtgtactctatattccagattgtgtctgcgccttgcccatggcctcggtcgacctggcgcgtttgttgattaggccggcttccggtagtagccgaagctctcagatcacgcctagactgcgtatgtaggcgcgctggtggacccattgactcccgagaagtaccctctgcactagtccatcttaaagatgaagaggtactttgggtttggtccaggacttgagtagtctgagagttatcccttatagcactcatctcacttggagccttcctcttcttcgaagtacttccgcttgacttccatggcaaagactgtgatcggggttggtccagcacagttgtagttggtgagcctcctcctgacattgatgttcgaggaatctggcgacttggggtttcgtctgggacttgtgtagcagaagactgttccctggcagtactccgctcacttagagtcttcgtcttcctggagatactactgcttgattctgacaacagagaccgtcgttcgggaggaagagtactaccctttgacttccatggcaaagaccgtggtcggggttggtccagcacggtcggggtttcgtctaggacttgcgtggcagaagactgttccctagtagtactcatctcactcggagccttcctcttctttgaagtacttccgcttgacttccatggtaaagaccgtgatcggggttggtccagcacagttgtagttggtgagcttcctcctgatattgatgttcgaggaatctggcgacttgtggtttcgtctgggacttgtgtggtagaagactgttccctagtagtactccgctcacttggagtcttcgtcttcctggaggtatcatagattggttcccatggaaggcggcgcccttgatgttgctctggttcctcgtcggttatagggaggtcgccacttgatggctgccgaacgctatgcctccgcggtcgcttttgcatatcgatggtccgagggattttgttaactgatggccatttaataccgcggctctgaggtctctctggttccccagcagtcgaagagatatctagcggttgaacgctctgcctctgaggtagatttggcacattgatagtgcgagtgtaatcgttgattgatggccattgaatgccacgacttcgaggttgctctggtacgctggccgtcatcgtaaggtcccttggggtatccgtctgacttggactacctcccttactgatagtatcaccgatcggccgtggaagaggttgtcttttctgtatttgcgcacccttcgatactagtatttggcttaggggtatcggtcccacttgcagtctcccttgcccgatctcctcgtcagagtcctagaccgccctttctgtaggtgactcggcttcatgatctattattactaccgaatattagtctcgaattaaattccttaagatctcaacgtaccctgaagtactgccttaacccgttgggactgcatatccttgatattccggccagcctatttcaaaggcggtttttgtcacgttaggtccccaattagctaagcaagcaaccccaacttgcgacttcgcaactcagagtatcaactccgagtatcaactcagacgatcaacttagacaatcaactccgagtatcaactcagacgatcaacttagacaatcaactcnnnnnnnnnnnnnnnnnnnnnnnnnnnnnnnnnnnnnnnnnnnnnnnnnnnnnnnnnnnnnnnnnnnnnnnnnnnnnnnnnnnnnnnnnnnnnnnnnnnnnnnnnnnnnnnnnnnnnnnnnnnnnnnnnnnnnnnnnnnnnnnnnnnnnnnnnnnnnnnnnnnnnnnnnnnnnnnnnnnnnnnnnnnnnnnnnnnnnnnnnnnnnnnnnnnnnnnnnnnnnnnnnnnnnnnnnnnnnnnnnnnnnnnnnnnnnnnnnnnnnnnnnnnnnnnnnnnnnnnnnnnnnnnnnnnnnnnnnnnnnnnnnnnnnnnnnnnnnnnnnnnnnnnnnnnnnnnnnnnnnnnnnnnnnnnnnnnnnnnnnnnnnnnnnnnnnnnnnnnnnnnnnnnnnnnnnnnnnnnnnnnnnnnnnnnnnnnnnnnnnnnnnnnnnnnnnnnnnnnnnnnnnnnnnnnnnnnnnnnnnnnnnnnnnnnnnnnnnnnnnnnnnnnnnnnnnnnnnnnnnnnnnnnnnnnnnnnnnnnnnnnnnnnnnnnnnnnnnnnnnnnnnnnnnnnnnnnnnnnnnnnnnnnnnnnnnnnnnnnnnnnnnnnnnnnnnnnnnnnnnnnnnnnnnnnnnnnnnnnnnnnnnnnnnnnnnnnnnnnnnnnnnnnnnnnnnnnnnnnnnnnnnnnnnnnnnnnnnnnnnnnnnnnnnnnnnnnnnnnnnnnnnnnnnnnnnnnnnnnnnnnnnnnnnnnnnnnnnnnnnnnnnnngactatcaactcagactatcaacttagactatcaactcagactatcaactcagaggatcaacttagactatcaactcagagtattaactcagagtattaactcagagtattaactcagagtatcaacttagagtattaactcagacaatcaacttagaggattaactcagacaattaacttagactatcaactcagaggatcaacttagacaatcaactcagaggatcaactcagataatcaactcagacaatcaacttagactatcaactcagaggattaacttagataatcaacttagactagttaactaacgtaattcactaccaagcggcgcacacacccaagtggcgcaccccaaaacacatagtaagaatgataaattccttacctatatctcaactaacaatgttcttatttaatttcattacttcccgatagcaattgataagtatttttagtattatatctctgttttaaataaatcgagaacttgcattgttatggtatcgaaaaatacgtcgctgaacccctagaaatatatatatctcagtttgtcaaagttcctgaaactacataagttagatatatatcatataaaaagaactgggctataaggaaaactttatatagatcactgttgttacgatatcatgttgtaatttatcatttttactatgtgttttggggtgcgccacttgggtgtatgcgccgcttggtagtgaattacgttattaactcagaggatcaactcagacgatcaacttagaggatcaactcagaggattaactcagataattaacttagactatcaacttagacaatcaactcagacaatcaactcagacgatcaactctaaggatcaactccgaggattaactcagataatcaactccgaggatcaactcagataatcaactccgaggatcaactccaaggatcaactcagaggattaattcagacgattaactcagacgattaactcagacgattaactcagaggaatatcttattagtaaacgaactagcctaagtacctatttaacctgtgacttttgctaatgcttttgcgattcctaccaagtccttttccccgagtgtaattaatgcaaactcggggggaagcgtcttcctgttcctaggaattattagctataccccaaaaccattgatcaaaaatacttactttaaagcccatttttttatattccgcatcctatccttgcaatcgaccggcgttcgcatttccagttgcggatcctccgactcatcatcaagctgcttaatatacgcccaacgcatagggaacttcatccatagccggatcaaccgagcagtttccgcttcttcccatcgtactttcattcgcgagggaccatgcgattgcattcgcgagggaccatgctgttgttctctccctaattctaataactcctggatccgcttttcttcatagacttcgcgctcttccgcaaatgaaggaccatgtcgagatccatatgctacttccctaattacagtccccgcaaagtgactcgggtcacaactttccgatcgtgaggtatcgcgaccagtgccttgttgggtgtcacgaggtcctgagtaccgacctcgtaaagggtgctcctcgatactatggaacacttcctcttcgcctagtatctctgagtctggaagactttgctgtcgatactggctattcccccgtgtaggaggagggcttgaaggaatggcggatgacataccccatatactctcgtcatcacctttattagatggttgctgacgttgaatataactgaagtctcgcgatgttcgcgccctctgtggtgtatgacgagacgaaaagtcgaggtctgaggtgtactctatattccagattgtgtctgcgccttgcccatggcctcggtcgacctggcgcgtttgttgattaggccggcttccggtagtagccgaagctctcagatcacgcctagactgcgtatgtaggcgcgctggtggacccattgactcccgagaagtaccctctgcactagtccatcttaaagatgaagaggtactttgggtttggtccaggacttgagtagtctgagagttatcccttatagcactcatctcacttggagccttcctcttcttcgaagtacttccgcttgacttccatggcaaagactgtgatcggggttggtccagcacagttgtagttggtgagcctcctcctgacattgatgttcgaggaatctggcgacttggggtttcgtctgggacttgtgtagcagaagactgttccctggcagtactccgctcacttagagtcttcgtcttcctggagatactactgcttgattctgacaacagagaccgtcgttcgggaggaagagtactaccctttgacttccatggcaaagaccgtggtcggggttggtccagcacggtcggggtttcgtctaggacttgcgtggcagaagactgttccctagtagtactcatctcactcggagccttcctcttctttgaagtacttccgcttgacttccatggtaaagaccgtgatcggggttggtccagcacagttgtagttggtgagcttcctcctgatattgatgttcgaggaatctggcgacttgtggtttcgtctgggacttgtgtggtagaagactgttccctagtagtactccgctcacttggagtcttcgtcttcctggaggtatcatagattggttcccatggaaggcggcgcccttgatgttgctctggttcctcgtcggttatagggaggtcgccacttgatggctgccgaacgctatgcctccgcggtcgcttttgcatatcgatggtccgagggattttgttaactgatggccatttaataccgcggctctgaggtctctctggttccccagcagtcgaagagatatctagcggttgaacgctctgcctctgaggtagatttggcacattgatagtgcgagtgtaatcgttgattgatggccattgaatgccacgacttcgaggttgctctggtacgctggccgtcatcgtaaggtcccttggggtatccgtctgacttggactacctcccttactgatagtatcaccgatcggccgtggaagaggttgtcttttctgtatttgcgcacccttcgatactagtatttggcttaggggtatcggtcccacttgcagtctcccttgcccgatctcctcgtcagagtcctagaccgccctttctgtaggtgactcggcttcatgatctattattactaccgaatattagtctcgaattaaattccttaagatctcaacgtaccctgaagtactgccttaacccgttgggactgcatatccttgatattccggccagcctatttcaaaggcggtttttgtcacgttaggtgtaagatactcctagatttagaaatttcaataaagaaattacttattaaaaatatatattatttattaagggaagcaactttgtggggaatttgggttctagggtttaggaatagttagtataccgtattcagtgattattattcgcttatctttttcatggaaattatatccactctaccataaaatataggggattggtagggttggtgtcagggaagccggaacgggccggaaaggtattccggccgagaacacagcctgcctgataatgtcattgaacgccaagctttagcggttagaaaaataagtgtggatttcaacagctacaagcccgaattcctaccatagaactaccatcacaaatgcctttacgacctagccagcgtacaaggcgtgtacgggaagatacccgagcccgtacagcctttttacgtttaagccagacaaataacctagaatccgaccttgacccattccgcaataccttcctccttaatgatccacgtctaatcgagccttctgaaccatcagactggtcgattatgaacgatcttagggaggcccttgatgctgaaccggagctacgtgagaatctagcagaacccgacatcacttctattctaccactagcacagtataattccccaccgtctttccatccccctcaggcctcagacgatggtttatccgctatctcacctctagtagtcgatgactggcaatctaccccggataatatcattgatccagataccaggccaagttagttctttctagtcactatcgcgatatatccccagggactaaaatataagtagatacaccccagccagagcctacaccaggaccttcccgtgtcccctcgccatcacatgaatctaatactctaggggttgcatctggtcgaccccaattagacccgacaccgctagcccaggcactagtcgaccaactcatccaacatcaaggctgtcaagctcattctctaccttcccgtagcccagagtctgtctctctctcgacggtttcaggctggacctgccctgacgtactctcttccccgagtatcgcccaatatcagtctgggaatccatgggataccttattccctatcgagctcagacagcaggtctataccggaggtatagatatgagtccgtccctcgatctacatgcagataccgtcgagccagagggtctccaggtctatttcgatattgatagtgccgggggggttgcatcatcacttgccgtcgcgaaagaagggctcaagtggaaggctggccggagcgcagtcagtaatctccagagctcccttcacctcaaccctatcccggtccaatggtttgattctcggcgtcatagtgcgcttcgacccctacatcaagtcccacatctcccgtttggtcgtctcgtgggctttccggaggtagaagtctatctcatttttccacggctctaccacccatcccgcgaccactgggtcatcacagtggatgaatatacgcaatggaccgattctattcttcttcccgcaatccagcagacgtatcctacgtctacggtccagcacctccctagtagcgctgatcatattcggatgaatggtactgctgcacaggtagagggtcgttctggggcccaaactatcactcctacctttacgcaggacttccacttcaatctccacgcagaccgattggatgcactctgggagtgtgttcaaacatatacccagcaagatggacttacccacttttccaactgctctatcctcctaacagctaagaacctgaagcttgtcagccagcgcgctacctgggcccaggcacgtgacgcgtttcttcatcagtggaagcgggctattaacccaacctttctgagagatgatttctacgatatcgccaaggaagtagtaccaagatccccgcaggcgatgactctatgctggcgccgatgctgccttgagagctttagcacgtggctcggccagagtaacgctgccgcagaggattgccaaaattccccgccgacctctcggactgaaggccaggtaaccaacaatgagcaagattaccctaggactcgaagtcggatagtaggccgtccactaagtcctagcgaagatagtctctataacgaaagtgtccatgaggacagcctctatgaggacagccttaatggggacagcctctatgaggaaagcctccatgaagagacccccggttctgattcctacgatccacaccagagtgaacaggatcaaaatcccgctccggagccgtccaaagcccagtggcgccagcaattttatccccagtccctagttcgggatcagtgctcgatgactcttgcaccaaaccgcactagtcctctctggcggcgtggactacgctactgccagttatataatacctcgaaggagatgtttgctgctggtaaccattacctctttggcaatcctcatttcgactcccttactctcgaccctgccatgctacgctcctggcagcatgtcggtggcgcagtcagccactccccaatcacattactccgcggttatattcataccaagattcgcagtcacactgcgcttagggactgctcacagcgctcctatggtacccatgaggaataccgtgtgactggggctgtattccagaccgtcgatcgactactctgtgcctctggggttgcagatactccaatcattctcccaacggagccattcccattctgggcatatcctacccagttaatgactacctggtggcgctggaatatcaatcgactctgcgttggctttgagatgacatttagccttcgaccgcgtacctttgtgcactgggagcatacccgcgtaatgatgatgtttctcaaatgtcttctctacgtgtatggcggccagggcgggcatcctcagcaaagcctcggtctttggattgaccgtcggagccaaccccgccccggctctgacacagagtttatccaggaaggtatggctcttgggctatcattggcgaagtatggctatggttggcttgcgagtaaggtggactggacggttatggtctttaaacccgcccaccgtgcctatatcgtctttaatacgccaagtatacagtctgtgtatcatcagcgctattgggcagttcggcagtccaaggatgattttttaatcttccatgatgtgctccagcgggttcaagactaccatctcgattctgaccgttctgcgttactccttcagctcctagtggatctctgtctacgtgccttccgccaggatgtctttcgggcccttagtgaacgccagacccagcagcccctcaatgcacactggatcgagaaagctcgggccggcgaggttgcgctcgacatccacgggtttcgccaggttttcgatattggtatcattgaggacgacctccatttcgtcaacaccaaaaattccgctatccgccatctagagaccttattcatccggctctggggctgggacggcgatggtaataatggcgactgggaacgtaagcactgggaatataaaccgtaccgggtcctcttccgccagagctatggtatcatcgcgcagttccatgggatgcaacaggcgcgcgcgtggcgccaacgcctgaaggagacctggattcggtcccactggatcctcccatatcctaactcaagtaccttctggtcccgtggcacgaaacagggtcggctccaggtatggtcaagtgtacatccgggactaggtgagtactacgagcggcgaccccaagggccaccaagccgtatcaccccagagaagctccactatctacctatctcaggctggaaatgtcaacatcctggtcgcatcgcgccgcttgttcagattattcttccacctatcccgtccgatcttgatcattttctcgatctcggtgatagcgtaagcaatacaagcgaggggaatcatctgcataatccgtcacaactaagcattcctcttcctgcaccgggtatacatccagactctgtgcttagtccgttcatccatgctatatctccagagctccactttctccgtcggttcaagaaggaaagcaaacttacgaccgacgagatccaccaagattctaggtggcagcagaggattcttctaaagcatattgaggctgtcatccgcgtccatcagcacgagctgaacatgctccagaaacccctagtcgtatggccatcccgcccccgcccgaggctgaccaatggcctctctcagatccatgttacgcctcagcagcttaaggatgaagactcggatactggcaacttctaccaatgtcgtgaacgcctccggcatgagattctacggctacaccaaagggcagggcggacacggcatgagatcgctaggatcgatcgaacggagagaatcatccaggcccaccagccccgagaccttacagatcacgatgaggcttcacagggcccttcggatcaacttaggtgggctaagaagcgaaggcggctcgcccaggaccgactggaacttatttctcgcaagtgtactaggtagtttatgaaaggagaccaggcggtcgatgggactgtatacgcttcatcgcaactgctggatgacaataatagtcgctgcgggggagattatggagaagccatagatgcctgcacgcgttataacttttctccactgtctctcccacagcttccaccgagctcgctggaggattcgcacttcgatatgggggtgtttctaggtgctgaggctgctgcagccgctgtattgccgccgtccagtgactcgttctttgatgaaaccgccggtctgattgaggaggcgtttagggagacgggcggcaagttcttggaggatatattcgatgggagccttgaggatactgggggtatactgcttagagatatttgattagcttgatgttttcctttggctgtatcatcatgaatggctgcacctttttgtcttctaaagatcgcaataccaggattcgatgagtctatgcccgggagaatcgcagttatcgaactggtaaactgtatcaagctttatttattgatagcgtggctgcagttggagtgatgcagcatatagtcgagtgtaagggattcaaggtggattggagatagatagctattctgccgctttgaccgcccaagtagggtagactcagaagaccgcgacaagaggatctactcctttgttctcgcccacgggaaatgttgggtttgatcggcagttggaagttgagttatttcgctcagaatgctgcgacaatagaccccgctttttgtctgtactcacggaaccggaggggtttacccatagcaggagtttaccagcgacaggatacagcatgaatgatggcccccagactctgcaatagtcggtgccttcgaatatcaatatcctgcaatgctagtctataagagagtcagctggataaagtgcacttctccctgtcggcgacctcgagcatcagcatcctacaatatcagtctatagaagagtcagctgtataagttgcgcttcatccccctctgagacattgagtatcaaaccagcggaatgtaatgcaagatcggttaaataaagtacggtttgttttttacctgtggaacctgaggattttgcctgcagctgtgtttggctttctcagatgagcttgctccccaatattggacctnnnnnnnnnnnnnnnnnnnnnnnnnnnnnnnnnnnnnnnnnnnnnnnnnnnnnnnnnnnnnnnnnnnnnnnnnnnnnnnnnnnnnnnnnnnnnnnnnnnnnnnnnnnnnnnnnnnnnnnnnnnnnnnnnnnnnnnnnnnnnnnnnnnnnnnnnnnnnnnnnnnnnnnnnnnnnnnnnnnnnnnnnnnnnnnnnnnnnnnnnnnnnnnnnnnnnnnnnnnnnnnnnnnnnnnnnnnnnnnnnnnnnnnnnnnnnnnnnnnnnnnnnnnnnnnnnnnnnnnnnnnnnnnnnnnnnnnnnnnnnnnnnnnnnnnnnnnnnnnnnnnnnnnnnnnnnnnnnnnnnnnnnnnnnnnnnnnnnnnnnnnnnnnnnnnnnnnnnnnnnnnnnnnnnnnnnnnnnnnnnnnnnnnnnnnnnnnnnnnnnnnnnnnnnnnnnnnnnnnnnnnnnnnnnnnnnnnnnnnnnnnnnnnnnnnnnnnnnnnnnnnnnnnnnnnnnnnnnnnnnnnnnnnnnnnnnnnnnnnnnnnnnnnnnnnnnnnnnnnnnnnnnnnnnnnnnnnnnnnnnnnnnnnnnnnnnnnnnnnnnnnnnnnnnnnnnnnnnnnnnnnnnnnnnnnnnnnnnnnnnnnnnnnnnnnnnnnnnnnnnnnnnnnnnnnnnnnnnnnnnnnnnnnnnnnnnnnnnnnnnnnnnnnnnnnnnnnnnnnnnnnnnnnnnnnnnnnnnnnnnnnnnnnnnnnnnnnnnnnnnnnnnnnnnnnnnnnnnnnnnnnnnnnnnnnnnnnnnnnnnnnnnnnnnnnnnnnnnnnnnnnnnnnnnnnnnnnnnnnnnnnnnnnnnnnnnnnnnnnnnnnnnnnnnnnnnnnnnnnnnnnnnnnnnnnnnnnnnnnnnnnnnnnnnnnnnnnnnnnnnnnnnnnnnnnnnnnnnnnnnnnnnnnnnnnnnnnnnnnnnnnnnnnnnnnnnnnnnnnnnnnnnnnnnnnnnnnnnnnnnnnnnnnnnnnnnnnnnnnnnnnnnnnnnnnnnnnnnnnnnnnnnnnnnnnnnnnnnnnnnnnnnnnnnnnnnnnnnnnnnnnnnnnnnnnnnnnnnnnnnnnnnnnnnnnnnnnnnnnnnnnnnnnnnnnnnnnnnnnnnnnnnnnnnnnnnnnnnnnnnnnnnnntgctggaggtcagagctgggggcgcggtagccactagcattactcgatatgggacagtggacgggcgcagtttcagcctccttgaatgtcttcgccactacttcccctcggcgctcctgaatgcagacctgcgctcctcgagcttgggaaccgacgagatgtgcttacactgcgtcctctgtgtggcattcgatgatccagcgaccctccacgaccagaaaccgttctgcaacccgggctcagggaattcttgccgatcctgctcggaccagggactggcgtgcttccgcatcccgccgctgggaagccgcgagctcgcttcagacatgcttcgccgaacccagatatcgaactcggccttctcccacgaacactggcgcttggtctgccgtacaatcgctgagacagttggggtgagcgagcgggagctccgtcaagcgatgctgtgggataatcgctacctccgcccctgtgagcggtccgcaaggcaccccgaataagcctccatcaatcctgttacgtggtaccaatgatcaaagttgaaagctgcacaagaaatgaatcccatagaagaaataaatcactgctgaaattccttatctgcgatatatatcaaagtaaatcacaccctaagcggaaatgaattcctagtcggctatataaaatcataccagtccccggagtcgaaaaaaagagtttgctccatagtataaggcctctagtctctggacctcttggaatgcagcaagaaatgcctgcgctgctcgctggcgccattgctggataaagacctcggctgcatgggtatcggccccaaagagaacgtccagctcggaaatgacactggtattggtccatcggcggcgtccaaccagcgcatcggagatcgcaccaagtccctggaggtggaccgcgcccgggaatgcatatggcacagctccgcggtggacgctagtaaatccaggggtacctctctcggcggggatgagatcgcgatgcgacgcagcgacagcagaccacgtaccggcatcgtgagtatccagctgctcatggtcttcgccaatgccaataaaccatgggaggacggtacgtcggacttgggtggccgggccggttgagccataggggagctccgggcgcgagatgcgcgcatcccctcggtgacagacctggcgctgccacgtgaggccaaaatcggcctcatcagcggcagtccacatcccactggcgatgcgatgaacgacattctggttggagaggccgcgctgctcgacccgttcccaccactgctgcaagagtccctggcggtgcatgccaaggaggagctcggtacaattcgccgggtcctcgtcgctcagggtgaccgcgccctgtatgatgttagcactccgaccccggctgagatagcgggggatattgatatcgaggtgccgaaatgcggtctgggctccggcactggtacttttcgagtaccacgggaccgagatcaggcgccacgcatgatctgggcgaaggagaacataaaaggcatagtatgcgggatcctggcggatgagctgctggatcagaccgtgccacatacaccggagccatcccatgctggtcacactttcttcggcgggattctcgccctgggcccggtggtgctcatacatgtcgaattccaagtcaatcatcgaccagagaccgccggtatgctcacaggggacatcggcgctatgggtacagccaagcagtttcttctcaccaagccagcggaagagaggaatgaccactgagccatcggcatcccataagtctgcgatgggagccgtcggggggggaccgattacccgggtatagatctcgtctgcagtcatgccactcgcggcaaactggtcgatgcgaggcttaggcatttcgactgggtatttaaagaccccatgtgcagcagtgggactaggggtccgagccgcctgttggaaccacttccactgctcacatgtcgggtcactcttgatatgggcaaggctctccaggtgctcgaagatatattgtaagcggctgaagagtttttgattattcggcttactgcggagcccgattccactggcgaggagtcgagcatgggtccgacagaaattctcgggggaaagtgcccagtattgtgtaccacggccagcaattttctcaaagagttgcggcttgattcgtgtagtattcgcatcgtgggactgatcttgatcagcatttaggatatcgctactaggctgtcgctttccctggagaagacaaaggaggtgaggtgtaaagccgctctcgatgcagaggcatgcactggatgatttctgttttggctgggccctagtagccgaatgctcagaatagtcggggtctaggtggtctgcatcgatatcggtatcactataggcatcagagtctccagtatccatatggtcttcactgtcactgtgagcatcagagtctccagtatccatgtggtcttcactgtcactgtgagcatcagaatgtccagggtcgacgtggtcctcggtaggcctgcaggcatcagagtctccagtgtccacgtggtcttcactgtcaccgtgagcatcagagtctccagtatccacgtggtcttcactgtcaccgtgagcatcagaacatccagtgtccatatgatcttcactgtcaccgcgagcatcagaatgtccagggtcgacgtggtcctcggtagtactacgggcatcagaatccctaagcctatccatcaagtctttagcctcactgtaggtatccgaatctccaggctccgagtcgatctccatatccccctcaggcagtggcgcggtctgcctcggagggatctgagtccgggcctcggtgctgcttcgaatgaccaccgatggtgtactcggcggagacaatgcaagactgagaggaggtgtcgaactcctgggcgtaaatcgtcgctcgccggatttcaccatcgcggcggcgtcagtaaggagcccgtcggatctatagtccattccgatgcggtggagcatggtctgcgtgatatgggtttggcggaaattccgataggcgcgggtgagatcaccctgcgtgagcgaccgcgtcttgagctggccgggccgactagtagagagtcgagtgcagagctcgttattggtggcaagcaggaagctatggaaggtcgggggtttaggccgatggagcatcttactgatcccttctgccatggcgagggtagtgatccgttggaagaggcgctggatcatggcttccgtgatgccatctgccttggatccccagacttgatatgcccgagtctgaatcgagcggatgcgcttcgtcgcattctcatgtcgcctcatcgcccgctgcgcagtctcccagtttttgctctcaacgggtgaggagtcgggatcggagatcacatacttgttatggcatcggctatagaaaagggcaagtaaagcctcgtcggtactgagctgcgtgacgagagcggcgaggacctagggtagaatggtgtgagttggcggtgaatcaatgctgggtgggttcatactagctggcagaggtcatggccggcgcggcctggctgcgtttcaatgatggcgagtgtatcttggaggcgactctgggtccagggaccacctagagtaatggtatgattctgaccggtactgtcagtgatgaagcactcctgatcgagtgacagggctggcataattgaggcgtggagtgatttgattgcgaggctgatgtagaattaaaatatatatattagtgatgcgcggttggaatacatttgagcagggcaacagatatgatctttgatcttgggtttctatttcaggtatcctttgagatcaattatgaaaccagccctggatgcaggcttctaagttgaggaaaaagtttctagtatcctttgacattatacaaacttgaatagcctaggaatagaccttggcgatcactcggtctccggtaatgatttctttcttctaacgaactgggaatccaacttgcagagggactcgggattaggaattccgtagcacttctttattagtactggtttctttgacctatatgggtgattttcctctgtgaatcttcgctccacagtaagcctggaagtcatctcccaagttgataaaaaagtaggctgttctactgtgaaccattactcctacccccttttttttttttacctacaatggctcccacgttaaggtcctctacgataccccaagctgtgaagacagcagcaaaggccccgaagatagcagcaaaggccccgaagagagcagcaagggccccgaagagagcagcaagggcagcgaagagagcagccacagtagtcaactcgacactcccagacctggacttacctccatatatagtgatacggcaagcccaacccgctgctgcagtcgctgctcgcgatgtaccgttcgcgggggaaaggactttcccaactccgccggtaccctttatctatcacccaaagctgatgtggtgcctccgctgcctaagcgtgaagctgaatgggttcctgccgaacccaggagaaagctttggggcagccggaacactatgctgctttgaatatacgggttcagtcaagtgcgctgggtgtcgggcggccagtcatctctgtgaagtggtatatgccgagcccgaagcggtcggaggttactaacagattcgataggtcccggaggcgatgcagcaggacgcgttggatttgaccgtccttctgcgctggggagatcggttctggactgagccgcagcccagtgttgcatgggatccatcgttactgcaggccgtttcaacgtgtaccttccggctcgcacaatccttctacgcgtttgtcaaggagcatatgcagcgccatgggctggagaagaaagatggcacgaaactgaaaccggtaggtaaccatccgatatccgtgatcagagactaatagagcccaggaggagagggagttatatgaggacttcatccatcgacgccgattgaccctagcatcgatcgcccagaaagcccggtatccagtcgagagacagtgggacctactgtttttacaaccgggggatgaagaatacatgggctggctacgagcgaaggttacattttatattacgatcgaaacgtgtgtgcaacgcctgcacccggctgagaggtccatcgtttatagctggccgctggataagaagcagttaaacttggatttttgaggggatagattgggcttttggagattgaaatacggtatcggcttgagttcttgcgtgtctgctgcgaataactagaaattgagttactgtttctgatctgtatgaattgggtcttgattcggattacaagtatatattggaaagtagagagtatggagtaataagcttggggaatctcgtgggatcgaatgctctttgcctggatagagcatcgcaacccttgtacccaggcccatcggaaccactgcgccaatgcggcccaaagtccccagttcggggtccaccgtgcccaatgctggaagggggctctgataacttctgccgtccctctggcgattaggatgatatcctggataaggatcaggacgtcgcggatgtcctgaaggaggttctgaaccctcgcagcgactgtgacggccttccgcatgatatctgcggcacggtcgaagagggtggtactcgccacagcggacatggcatcaggcattgtaggagataatataggggaatcaagtaggtagatccgacttgaatctgatctctgcgacggtaattagtcaggctgggtgggaacagaattgaggatgacttaccttgagaggatgagtggacttgaatatttcgacgatgcaccttcgggcgatttgggatgattggctttagggctgaccgcctacgggtagttctgccggccataccccacaaatgaattggtctctccgctttactttgagcctcatgtgtatctctttgccctcagcgaatcccccccccctcaatgacactgaccactaatatccgacagaggatattgataccaagttctaaacctaaaatccatactattccatatagagatatccagaccttgactgtacaaccccaaaatctgctcactttgggctggcgaccaatacaaagaattcgctgccacgcaaatgaaatgattcgccggcgatcaaagcccagcgaattctcccaacttctatctatgccccgattgggcgagatacatcaggctggatggtttctttgactgtatactcggctgggattgtacattttccatttccagcgcgcggtcaccagattcgggcttatggaattggggctaagtcgcatgtctttattgcgttttggaatctaactttggatatggtgccctgccactgtgaggaggcttatttctttatttgatactggtgcaatgctaatactttgggtttacaatttcggcctacagccagtaagtagaagctgctcaagccacttcgaaccatccttgaaacccctgctactccgacttaaagcctaatcaattcctctgtgcaatcaattcctctctgcgatcaattcctctctgcgattaatcctctctgcgattaatcctctctgcgatcatggcatcgcaagttggtgggaagcctccagtaatacctgcagtagcgaagccacctgcagccgctcccctgacaggtcctagagtcttggacctgccaacatggaatgtgaggccagagccggtttgggttttctgtcttgggtgtttctatgtcgaggttactggctttcaaccaaacccagcggaatgctttagcttggaagagactatttgcgtattcgaccacccagtcgccagtgactgcgctgggtgtcgggctgcaaagcaggagtgcattatggtatgtgactgagatgaatggttggactgagctaatgatggatataggtcccaagaggattgcaccaagatgcatacgacttcatccagctactagtgtgggtaaaatcgttctgggataccggtgccaccaagaagcatcaatggcagccggagacactacaagtggtatcagaggcttcaggcgagcttgcatccagcttttatatcattgcgaaaaagcacatcgactactggcatcttgggccgagcgctacagccacggacagggatctatatgataaattcgtctatcgccgctcacagatccgtggaacgcgagtggggaagattagaaaagccgaagacactccggttcgcgtcccgctgtgtgagaagactatgattggtcttgtgccaggggatgtagaatttgcactctggactcgggccaaagttgctatcgtggagacggtccgagcagctgtcgctcagctagagggcgatacgggtaagacattgttggcgggctgggactcgatgatacccacatactatatatagggggaggtagaagaacggtggtatttcgaacttgtttaggtagtgttgtgaaattaaatgcttaaagattatgactccggcgcaaaatcaagtcactcctattatatattgtataaactatgtataatcccgactctgtgacataaggcgtcaaaaacttggaatatatgctgacaccagggcttcttcggcggccttgagcattgatatcctagaatatatattgataccgggatcatttgaataaagtgcgcgttatctcccccctccgagacattgagcatgaaaatcgtggaatgcatactgatactaaggcttttcatgcaaactgcgaccaatcacctgcctcagtaccttcgagtatcaagatcgtcgaatgtatgttaataccagggtcacttaaacagactgcgcgtaatcccctggtacaatcgattataactactgcttcaactatagtaagtactgtccaagtttcggaagaaggcggtctgtggcagaatctccgactcaagaacaaaacatgtcgaatcagcccgcgtaacatcggcccagaacccagcaccaaagctgggttccgaacctatgcttttgcaagtagacttcttagggagttaaatgtaaactgtcaagacctcagcgcgatttagctcggtttggccgattggatgggggtagaaatttgcatgcaagtattcagatgcgcacgacttgacagaagcttggcgcgggaaggctccacctccgcgaccacatcaaacttttgagatattcaagtccccacaacatacttcatagcagggctttagactctagtacctatgaaagtttcaagataatcgaggctgggttgcgggctgtacccagcgtagacaattctcagcaagcattcagcggcaaagcctataccgcattagatactccgtggtagagtatcaattgctaatattatggttgccgcataatgcgtcgccgagtcgcgcgactcgcgccccgctgtaaacaataatcttctgaggcctgcctagatcttctttcttttcccccaacactcctccaagcttactctggcgacagctttccaattgtctcaaggtacaccctatgtccttactactttgtcgccaagtctgaccgattctactgcctcagctattcctatccggctcgcctgaccgctgaagttcaagctgtctcaatggcgttccctttggcgttgacgatagtaagagaatttctccaggcggtattctaagcccaaaaatactaactatcctctagtcgcttttcacgctcctcactactgtgtccgtcgcctattacctcttgaaactgcctgctgccatgccctgctccatggcggagatgctcgctttccttacccgggcgaaggaaatcctgcggggagtactcgaggtgctcactattgcgaagaaggtcctggaggaagtgaaagaggtacttcggatcgccaaggagattacgattatcatcggggagctattggccgctgtcagaggcctctttcactggcgccagtgggcgctatggatactggaggttgggcgttcttggctccagtgggcacaggctattaagcattcttggcttcaatggatacaggtcacaaacgattcctggcttcagtgggcacaacaggttcagcgctcctggctccagtggatgcagactattgagtattcatggcttcgatgggagcaacagctcgagtactcctggctccagagggcacaggctattaggtaccaattgattactaactctcttcttgctattctacgttcttctcgagggagaattataattgtggataactagttacttatcctaaagcccaatcgtgcaatacatactgacaccaaggtcagccgaacagagtgcacagaattctccctatcagcgacatcgagcatcagcatcctgcaatgcgcgcaattctccccgtcggcgacctcaagcatcaacatcttgtaatacatactgacaccaaagttagctgaacaaagtgcacgcaattgcccctatcggcgacctcgagcatcagcatcctgcaatacgcgcgattccccctgtccacacaattcaccccgtcggcgacctcgagcatcagcatcctgcaatgcgcgcgattccccctgtccacacaattctccccgtcggtaacctcaagcatcagcatcctgcaatgcgcgcaattcctcccgtcagcgacctcgagtatcagcatcctgcaatgcgcgcaattcctcccgtccacacaattctccccgtcggtaacctcaagcatcagcatcctgcaatgcgcgcaattcctcccgtcagcgacctcgagtatcagcatcctgcaatgcgcgcaattcctcccgtccacacaattctccccgtcggtaacctcaagcatcagcatcctgcaatgcgcgcaattcctcccgtcagcgacctcgagtatcagcatcctgcaatgcgcgcaattcctcccgtccacacaattctccccgtcggtaacctcaagcatcagcatcctgcaatgcgcgcaattcctcccgtcagcgacctcgagtatcagcatcctgcaatgcgcgcaattcctcccgtccacacaattctccccgtcggtaacctcaagcatcagcatcctgcaatgcgcgcaattcctcccgtcagcgacctcgagtatcagcatcctgcaatgcgcgcaattcctcccgtccacacaattctccccgtcggtaacctcaagcatcagcatcctgcaatgcgcgcaattcctcccgtcagcgacctcgagtatcagcatcctgcaatgcgcgcaattcctcccgtccacacaattctccccgtcggtaacctcaagcatcagcatcctgcaatgcgcgcaattcctcccgtcagcgacctcgagtatcagcatcctgcaatgcgcgcaattcctcccgtccacacaattctccccgtcggtaacctcaagcatcagcatcctgcaatgcgcgcaattcctcccgtcagcgacctcgagtatcagcatcctgcaatgcgcgcaattcctcccgtccacacaattctccccgtcggtaacctcaagcatcagcatcctgcaatgcgcgcaattcctcccgtcagcgacctcgagtatcagcatcctgcaatgcgcgcaattcctcccgtccacacaattctccccgtcggtaacctcaagcatcagcatcctgcaatgcgcgcaattcctcccgtcagcgacctcgagtatcagcatcctgcaatgcgcgcaattcctcccgtccacacaattctccccgtcggtaacctcaagcatcagcatcctgcaaaagagagcagcaagggcagcgaagagagcagccacagtagtcaactcgacactcccagacctggacttacctccatatatagtgatacggcaagcccaacccgctgctgcagtcgctgctcgcgatgtaccgttcgcgggggaaaggactttcccaactccgccggtaccctttatctatcacccaaagctgatgtggtgcctccgctgcctaagcgtgaagctgaatgggttcctgccgaacccaggagaaagctttggggcagccggaacactatgctgctttgaatatacgggttcagtcaagtgcgctgggtgtcgggcggccagtcatctctgtgaagtggtatatgccgagcccgaagcggtcggaggttactaacagattcgataggtcccggaggcgatgcagcaggacgcgttggatttgaccgtccttctgcgctggggagatcggttctggactgagccgcagcccagtgttgcatgggatccatcgttactgcaggccgtttcaacgtgtaccttccggctcgcacaatccttctacgcgtttgtcaaggagcatatgcagcgccatgggctggagaagaaagatggcacgaaactgaaaccggtaggtaaccatccgatatccgtgatcagagactaatagagcccaggaggagagggagttatatgaggacttcatccatcgacgccgattgaccctagcatcgatcgcccagaaagcccggtatccagtcgagagacagtgggacctactgtttttacaaccgggggatgaagaatacatgggctggctacgagcgaaggttacattttatattacgatcgaaacgtgtgtgcaacgcctgcacccggctgagaggtccatcgtttatagctggccgctggataagaagcagttaaacttggatttttgaggggatagattgggcttttggagattgaaatacggtatcggcttgagttcttgcgtgtctgctgcgaataactagaaattgagttactgtttctgatctgtatgaattgggtcttgattcggattacaagtatatattggaaagtagagagtatggagtaataagcttggggaatctcgtgggatcgaatgctctttgcctggatagagcatcgcaacccttgtacccaggcccatcggaaccactgcgccaatgcggcccaaagtccccagttcggggtccaccgtgcccaatgctggaagggggctctgataacttctgccgtccctctggcgattaggatgatatcctggataaggatcaggacgtcgcggatgtcctgaaggaggttctgaaccctcgcagcgactgtgacggccttccgcatgatatctgcggcacggtcgaagagggtggtactcgccacagcggacatggcatcaggcattgtaggagataatataggggaatcaagtaggtagatccgacttgaatctgatctctgcgacggtaattagtcaggctgggtgggaacagaattgaggatgacttaccttgagaggatgagtggacttgaatatttcgacgatgcaccttcgggcgatttgggatgattggctttagggctgaccgcctacgggtagttctgccggccataccccacaaatgaattggtctctccgctttactttgagcctcatgtgtatctctttgccctcagcgaatccccccccc

SEQ ID NO: 26 - DNA, 18224 bp, Penicillium roqueforti
  misc_feature (6267)..(10375): n is a, c, g, or t
acagttatagcagtgggttacgataagcatgcattagcagaaggattggcaattattattagtagcatagtcggcaaaattaagagatacctccttacatttcgaagtgcatacaggttatgatttgcctcaacgcttatagcaatagatgcatgaggtggtactaagacagattcggtctcccaaggcccttaacacaccaccaggaacaactttggcgttcccaggagctagactctagagattctccgcaaacattgttatcaaggctttgatactgccgtgtgattgctacgcacctcagaggagccacaggctacactcctagcggaccataggatttagccgaggcaagtatataaaggactcccatattcaactttcacaactctcaccttaccttcacctacacttcatttactctaagctccaatccactgtctaaccatggtctatttcaattcattcttaccgggcttaccgatgagctaatatattatagccaaatatcagagacctacccaacgagcttttgctatggattatatcgcatttggatggtagtacgatgttcgcccttacaaaattgtgcaaagaccttagttttagactctagcccagtatctagagatataacatcaaattccagaatagcaatctattacacctggccgttaaagacgacaatgttgatcttgcggcggctttgcttcagcataatgctaacatcaatgccttttaccgaggcaaaatacctttgatgagggcgtttcaatactcttccgccgcaatgcgtgagctgttgctcaatcgtcgagagctagatatcaacattcagaatcaagcgcacaaaactgcgctatggtataccatttactatagaaattattccatggttaagagccttttagagtaacctaaggtcagagtggatattaaatataaatacagccaaacggcgctctacctagcggttttcgctagtaggatagagtttatacatcttctactatcaagaggtagtaaccctaatctataggatgattcaggcgaatcaccgtaggcctaggcacatcgcttctatagacctataataaaaatgattctttccaacgaccctaactccgacttatttcttagaactcaatcatcacaggacgctcagctaccgctatatcaagcagtagcccatggttctatcgccgctatctagcggcttctaaggcgaaaggacctagcgctagacacctaggaccacaaaggttatacgccgatccatctcgccgttaaaagcaatcgccctaaagtggttagtttactcctaagttacccgcatgtaaatgtgaactgcacagacaaatatggaaatacaccgctttagctttctacttactcgtcctactataaataaccgaaaggctgttagcctagaaaaaaatcgacgttaatctgattaggggccgtgggagattcgaaataccgtccatatctctataccacaccgcgaccagattagatactatacttctacaacgactgcttacagtactagagatcgatccgaatctctgcgttacaggtcactctccaatctccattaccgcatcccgcggatacataagcacggttacttgtctactgagtataggaagcttagagatcaatgggaggggcttcatagatccgccaatctatcaagcggctgcatacggctatcacgatatagtcaggctattagtgcaataaggcacacatctaaatatcaataaaagcacgatcgtatcttacaacactgcactctgcattactgcccgtagtagtgacttggagatggtccaggcactatcactctatcaccaaattgatgtcaacctccgcaatgaatattttgaggatccattgattttggcagtcaaggatggtcattcctcgattgttaatactcttttggcaaataccagacttaaacgcttcagtttgaagagatcgcttgatctagcaagagacgactgcatccaaagggctattcgaaccagaatagaatccgacagcactcgtcaaacattgttgaggcggtctccgaggatgaaatttggtggtctataaaacccatctacacctctcgtgatacaatgcgagatagctgttttcagcgtcacttgacataaactctcagaattattatctatacctccacgcttcgaataagtttattcacaataaagtcacgttcgacttcaacgacttcttgatgtatagcatccaatgcatcaaagttatacttacaaactatcattaggaggtagtttatacaagtctttatttcaaggcttcatctattacgcattttcacattaaattgagtaactcggggtaaacagcagatgaaatcgagcgtcaacagttgaggtaaccgttgaggtaaccgctcactgactcttttaaaggcagtcgaactcaggccggcacggtcatgggtggcataacagcagcctcggtaggactgccgggctataaaagactcttcagtacaatgtctcttgcatttcattccaaggccacaatagaccatcccacttcgccttacccatatgaccggccagctaagagacagtgccgggtttcccacaacccagaagataagaataagttgcaaagccatccacagcaatcttcaaacggcacaatcattaaacccgaggtcggtcataccctcttcgatagcaaacgaacaagatcactaacactacataggttctagtgcgcacacccggttccctaacggcggagttcatgaagcttctacaccacaacgacgccctagctacaccagccctcaaactactcgacttgtacttttgcctatgggaatgctacgtcgtcaagtctgccgaggagatacgacttaaggatgagcagcgacagcttcaatggttaaatgagtggctagcaagcaatagcgacatccttctacaggtctgcgataagcagacattgatactgtaggatcgaaagcgagcagttcaagcactttgtaacggcgtcgtttcagccttgcaagcaagcgatcccaaagccttccatgttaatgggccgtgatgaggtctcggcgttgtcgagcgctcgtgggcgataacgacacctgaatagttctgctatctactgccttctatcccgaatatcatccctctttctagaggcccatacaaccgccggtgatattccgttgggtttggtgacggggtgtaaacatttcacggctgttgatacacccaacgcttagtttagggcatttagtatctggccataattcctcctaatacgtccagaccttatgcaatcaagcatagataaaacctctgctcatcctgcggcattctgtccttcccaacccccgttagatcgccagcttataaacttctgtattctccctatagtacagccttcgacggcgagttttgaaccgaaatgaatgaatcgaacaaaaatggtctgtaccagttgctttcataattatttgtgctaaaattggtagactgtgattttggatcttgaccttcacgccatctggcaagagtgctctggcataccgacaccacctccctgtctcgccaccgactccgaaaattctcggcagattccctcggatgagggtaagcctgcaggagataagacttcagggtcgtccgtgatcgaatgccttttccatcccacttacgagaagctgtcagccttcaggtagactggtccagaccctctgtccatgtctactcaggctagcgacttgttcctctacatgtcagctttcgctttctctaacgaagtgcactgggtagagactcgactagtcctatttgatcggaaacctggcgagagtataggagagcatctgttcttcctaccccgggttgaaactgccctagggaatctctgtcgggtacgcggacagttgctagacacgatccatgattttggtgcaataggcaatagcttccgactgtctctgcggcctcgcatggaacttctacaatactcgagtcaatcgacactttctccgctaggtacgctaccgaccacactctccctggatccggagttttttgtgcataaaatattgggtggttacaagtgagaccggtccagaacataggggattgttcgcagacacaaggaatataatctgctgttcatactgtagttctccttcaattaaaacgtcattgtagtgtttctgctttaacaataggaaggataactccagatagccgatccctcactctcctcttgcattgtccggcaaccctgccagattgagtctcgaagggtggttccagtcatcgagtaccctaaccagcctctcccgggataattccaatacctgatcgaaaaagcgcagccgagacagctgcttgtcgtggcgaacctgaagaccatctctctcttttctcaggtgcgtaccagtctccttcaaagcaaggttgtcctgctctagcttctggccatcgatgtgcttggacacgcacgactcccataggcggcgatagagtccaacaagtcgagctgctggaaaggcgaacttgggatcgtcgcgctcgaggtctgctagaacctgcaagatcggttgaaatggctcggtcgccagggtgtgtcttgtttttgtttcctgttgcgaaggggagggctgcaatggtcagcaaaagcgtttgaagccgaatcgtttcacttaccaatgagacatggtcggaagtttcctgtgatttgtctttctcaccaaggatgggcaattcactgggcggctgctctcctccaatttcctggtctttttttcgagctgatttgtgcatccatcttgtccgcaggagaaagtcacggctctgaacaataccatttccatcgatccttggtgtctcttatagaatatgcagacgccggtgtgtatgggctgggttttacaatcaccacaacggtcaaccgaagcagtcaaattctgactggagttgttttacttttcagcgggctgttgacagtcaacttgatcataggatagtgatcaacgagtcggtcagggaaatttgatcgcctcacgatattgagggtcagatatgagcgctcatcggggagatatatatttcaatcggacacctctttccactctcgttgaaagtctcagaaagtcgacaaacggaacattatagaacttacagtaacctaaaaaaaaggtccaaaaagaaagcgaaaaaataacttaatgtatcttcatggtcacaagttagaaaattgagtgttgacaacgttgggccaagcttcaacgggttgacgggtcgatcacccgcacatcctactgtgacctcgctttccgcagtctagacggacagacccacagctcaacacaaccaacacaacactaaagcgaggctaggaaaaaaattccatgatttctagggataaaattgaaggcgcttttcggtgaatcaacgctgagtcgctcacagatgagatgatcacaacacaaatatgagcctgtcattgcggattgaatagtgacggaaaaacggtggtaaggcgaatgtatatgtggcagatggtattcctctcaaaattgtgcgttaggtctgatggcccactttcatcgactgttgaggagaaagtaataccgcgaaagtaagattcgtacccatcaccgaatttgcaattaaatcgctcaacgcgcttgcattctatatctccccgttttaaccacagtcaccgtctctttcataaggattgaagtgcttcgacagatgccgaaataatgggctggagatagccacggaaacgctgtgctgtacctgcggttggccggaggacctttcggtctcactagaatcaatactaccatctctaggctcgcgccgctgaatgttatttctttcctttctaatcgcagttaacttgtattgcctttactaaaatgtctactccctgggcgcataggcactggcatactttcaaactcaggataaagattgtctttctttggcataatagccaaaaagggtctagacctttgaaaagctcagacaagaaactgggtctagtttccaggacaaccatgtgaactgatgcaaccaaggcccacgagctaggttctcgagatcgccaccccctcgcaagattgcaacgctactattacactgacgagaccctggagacgaaaagcacccgaccggccaatcaaacaccacgcgtgaattcagacagatgcaggtagggttctgcgatgcagannnnnnnnnnnnnnnnnnnnnnnnnnnnnnnnnnnnnnnnnnnnnnnnnnnnnnnnnnnnnnnnnnnnnnnnnnnnnnnnnnnnnnnnnnnnnnnnnnnnnnnnnnnnnnnnnnnnnnnnnnnnnnnnnnnnnnnnnnnnnnnnnnnnnnnnnnnnnnnnnnnnnnnnnnnnnnnnnnnnnnnnnnnnnnnnnnnnnnnnnnnnnnnnnnnnnnnnnnnnnnnnnnnnnnnnnnnnnnnnnnnnnnnnnnnnnnnnnnnnnnnnnnnnnnnnnnnnnnnnnnnnnnnnnnnnnnnnnnnnnnnnnnnnnnnnnnnnnnnnnnnnnnnnnnnnnnnnnnnnnnnnnnnnnnnnnnnnnnnnnnnnnnnnnnnnnnnnnnnnnnnnnnnnnnnnnnnnnnnnnnnnnnnnnnnnnnnnnnnnnnnnnnnnnnnnnnnnnnnnnnnnnnnnnnnnnnnnnnnnnnnnnnnnnnnnnnnnnnnnnnnnnnnnnnnnnnnnnnnnnnnnnnnnnnnnnnnnnnnnnnnnnnnnnnnnnnnnnnnnnnnnnnnnnnnnnnnnnnnnnnnnnnnnnnnnnnnnnnnnnnnnnnnnnnnnnnnnnnnnnnnnnnnnnnnnnnnnnnnnnnnnnnnnnnnnnnnnnnnnnnnnnnnnnnnnnnnnnnnnnnnnnnnnnnnnnnnnnnnnnnnnnnnnnnnnnnnnnnnnnnnnnnnnnnnnnnnnnnnnnnnnnnnnnnnnnnnnnnnnnnnnnnnnnnnnnnnnnnnnnnnnnnnnnnnnnnnnnnnnnnnnnnnnnnnnnnnnnnnnnnnnnnnnnnnnnnnnnnnnnnnnnnnnnnnnnnnnnnnnnnnnnnnnnnnnnnnnnnnnnnnnnnnnnnnnnnnnnnnnnnnnnnnnnnnnnnnnnnnnnnnnnnnnnnnnnnnnnnnnnnnnnnnnnnnnnnnnnnnnnnnnnnnnnnnnnnnnnnnnnnnnnnnnnnnnnnnnnnnnnnnnnnnnnnnnnnnnnnnnnnnnnnnnnnnnnnnnnnnnnnnnnnnnnnnnnnnnnnnnnnnnnnnnnnnnnnnnnnnnnnnnnnnnnnnnnnnnnnnnnnnnnnnnnnnnnnnnnnnnnnnnnnnnnnnnnnnnnnnnnnnnnnnnnnnnnnnnnnnnnnnnnnnnnnnnnnnnnnnnnnnnnnnnnnnnnnnnnnnnnnnnnnnnnnnnnnnnnnnnnnnnnnnnnnnnnnnnnnnnnnnnnnnnnnnnnnnnnnnnnnnnnnnnnnnnnnnnnnnnnnnnnnnnnnnnnnnnnnnnnnnnnnnnnnnnnnnnnnnnnnnnnnnnnnnnnnnnnnnnnnnnnnnnnnnnnnnnnnnnnnnnnnnnnnnnnnnnnnnnnnnnnnnnnnnnnnnnnnnnnnnnnnnnnnnnnnnnnnnnnnnnnnnnnnnnnnnnnnnnnnnnnnnnnnnnnnnnnnnnnnnnnnnnnnnnnnnnnnnnnnnnnnnnnnnnnnnnnnnnnnnnnnnnnnnnnnnnnnnnnnnnnnnnnnnnnnnnnnnnnnnnnnnnnnnnnnnnnnnnnnnnnnnnnnnnnnnnnnnnnnnnnnnnnnnnnnnnnnnnnnnnnnnnnnnnnnnnnnnnnnnnnnnnnnnnnnnnnnnnnnnnnnnnnnnnnnnnnnnnnnnnnnnnnnnnnnnnnnnnnnnnnnnnnnnnnnnnnnnnnnnnnnnnnnnnnnnnnnnnnnnnnnnnnnnnnnnnnnnnnnnnnnnnnnnnnnnnnnnnnnnnnnnnnnnnnnnnnnnnnnnnnnnnnnnnnnnnnnnnnnnnnnnnnnnnnnnnnnnnnnnnnnnnnnnnnnnnnnnnnnnnnnnnnnnnnnnnnnnnnnnnnnnnnnnnnnnnnnnnnnnnnnnnnnnnnnnnnnnnnnnnnnnnnnnnnnnnnnnnnnnnnnnnnnnnnnnnnnnnnnnnnnnnnnnnnnnnnnnnnnnnnnnnnnnnnnnnnnnnnnnnnnnnnnnnnnnnnnnnnnnnnnnnnnnnnnnnnnnnnnnnnnnnnnnnnnnnnnnnnnnnnnnnnnnnnnnnnnnnnnnnnnnnnnnnnnnnnnnnnnnnnnnnnnnnnnnnnnnnnnnnnnnnnnnnnnnnnnnnnnnnnnnnnnnnnnnnnnnnnnnnnnnnnnnnnnnnnnnnnnnnnnnnnnnnnnnnnnnnnnnnnnnnnnnnnnnnnnnnnnnnnnnnnnnnnnnnnnnnnnnnnnnnnnnnnnnnnnnnnnnnnnnnnnnnnnnnnnnnnnnnnnnnnnnnnnnnnnnnnnnnnnnnnnnnnnnnnnnnnnnnnnnnnnnnnnnnnnnnnnnnnnnnnnnnnnnnnnnnnnnnnnnnnnnnnnnnnnnnnnnnnnnnnnnnnnnnnnnnnnnnnnnnnnnnnnnnnnnnnnnnnnnnnnnnnnnnnnnnnnnnnnnnnnnnnnnnnnnnnnnnnnnnnnnnnnnnnnnnnnnnnnnnnnnnnnnnnnnnnnnnnnnnnnnnnnnnnnnnnnnnnnnnnnnnnnnnnnnnnnnnnnnnnnnnnnnnnnnnnnnnnnnnnnnnnnnnnnnnnnnnnnnnnnnnnnnnnnnnnnnnnnnnnnnnnnnnnnnnnnnnnnnnnnnnnnnnnnnnnnnnnnnnnnnnnnnnnnnnnnnnnnnnnnnnnnnnnnnnnnnnnnnnnnnnnnnnnnnnnnnnnnnnnnnnnnnnnnnnnnnnnnnnnnnnnnnnnnnnnnnnnnnnnnnnnnnnnnnnnnnnnnnnnnnnnnnnnnnnnnnnnnnnnnnnnnnnnnnnnnnnnnnnnnnnnnnnnnnnnnnnnnnnnnnnnnnnnnnnnnnnnnnnnnnnnnnnnnnnnnnnnnnnnnnnnnnnnnnnnnnnnnnnnnnnnnnnnnnnnnnnnnnnnnnnnnnnnnnnnnnnnnnnnnnnnnnnnnnnnnnnnnnnnnnnnnnnnnnnnnnnnnnnnnnnnnnnnnnnnnnnnnnnnnnnnnnnnnnnnnnnnnnnnnnnnnnnnnnnnnnnnnnnnnnnnnnnnnnnnnnnnnnnnnnnnnnnnnnnnnnnnnnnnnnnnnnnnnnnnnnnnnnnnnnnnnnnnnnnnnnnnnnnnnnnnnnnnnnnnnnnnnnnnnnnnnnnnnnnnnnnnnnnnnnnnnnnnnnnnnnnnnnnnnnnnnnnnnnnnnnnnnnnnnnnnnnnnnnnnnnnnnnnnnnnnnnnnnnnnnnnnnnnnnnnnnnnnnnnnnnnnnnnnnnnnnnnnnnnnnnnnnnnnnnnnnnnnnnnnnnnnnnnnnnnnnnnnnnnnnnnnnnnnnnnnnnnnnnnnnnnnnnnnnnnnnnnnnnnnnnnnnnnnnnnnnnnnnnnnnnnnnnnnnnnnnnnnnnnnnnnnnnnnnnnnnnnnnnnnnnnnnnnnnnnnnnnnnnnnnnnnnnnnnnnnnnnnnnnnnnnnnnnnnnnnnnnnnnnnnnnnnnnnnnnnnnnnnnnnnnnnnnnnnnnnnnnnnnnnnnnnnnnnnnnnnnnnnnnnnnnnnnnnnnnnnnnnnnnnnnnnnnnnnnnnnnnnnnnnnnnnnnnnnnnnnnnnnnnnnnnnnnnnnnnnnnnnnnnnnnnnnnnnnnnnnnnnnnnnnnnnnnnnnnnnnnnnnnnnnnnnnnnnnnnnnnnnnnnnnnnnnnnnnnnnnnnnnnnnnnnnnnnnnnnnnnnnnnnnnnnnnnnnnnnnnnnnnnnnnnnnnnnnnnnnnnnnnnnnnnnnnnnnnnnnnnnnnnnnnnnnnnnnnnnnnnnnnnnnnnnnnnnnnnnnnnnnnnnnnnnnnnnnnnnnnnnnnnnnnnnnnnnnnnnnnnnnnnnnnnnnnnnnnnnnnnnnnnnnnnnnnnnnnnnnnnnnnnnnnnnnnnnnnnnnnnnnnnnnnnnnnnnnnnnnnnnnnnnnnnnnnnnnnnnnnnnnnnnnnnnnnnnnnnnnnnnnnnnnnnnnnnnnnnnnnnnnnnnnnnnnnnnnnnnnnnnnnnnnnnnnnnnnnnnnnnnnnnnnnnnnnnnnnnnnnnnnnnnnnnnnnnnnnnnnnnnnnnnnnnnnnnnnnnnnnnnnnnnnnnnnnnnnnnnnnnnnnnnnnnnnnnnnnnnnnnnnnnnnnnnnnnnnnnnnnnnnnnnnnnnnnnnntgcttctccccccccccggggggggggggggggggggggtgttcgaagccagatatcaagctttgaaatcactccattgggtgcaaaaggtactaaaccggcagctccgaagctatttctagtcgtttccgatttgaaggcttcaattcgtgcttctaggtatgccggaaggaaatcatctttatcgatatgatttcctactccgcatttttgtttcaactagccggctataggacttttttaacaccgcgaaatagctaatatcaaaaggctgtaaaagatgggatgaatgcggaggcatatagattggtataatactattttactcacaaatttcatcaaatttcgaggttaaatgaccaccgtatccgtcgagtattaaaagtcgatacctccccttcggaagtgaagaagtcgaaggaataaagagtttttgaagctatcgaattccaattttatcggaggtccaactgttcggactaagtttaaatcgctaatcatccggaaggccgtaggtctaagattcaataaagactttgcctttcaaaatcatatatagagtaagtacctaaccggaagcattcgtacactcgattaccgttatctacttatgatttctaggttataaaactagtcgccgactgtagtatttactccttgtaataaccttcgcggttactattatcctattgcgaaatcggtcttattaaagttataaatgttattagggtcgatcctaaattaaaggatggttttttgaataagtttaaaatactccctaataattttcgggtctttatatttcgtacgttcgtagttataccgttttgagaattaggaggaaagaagagggtgccgttttataaattttgtaacctaattttcgccgaccgaaataaccggggtggttccacattgttgaagaagaagatccgccatttctcgaatggtagagggccggggggctgctccacgagaatctatagagagtatctatttttgaagagattcctcttcaattctagttatattagatgaattggcgcgagaaatcgtgtggtgttggtagccgcgtagtcggtcttggagggttgaacgtggtatgttaaaacggcgcgccacttcacgaattgaagagatttcttgattcttaaaagcctcggtagctaataagattctaccctcttgctctactaaatttttagagcttcgggagtgaattggtggcatggtgggtggttgaattgactaagtgctaattcatggacgcgttttgggtggtgtggccggctcggtagtgaaatacgttactgttgtgatggtaaaactcagtatactcagtatttagtcacctgcgtctgcatagtctcttatatataagagacaccaaggtctgatggaaacggtactacccaggcctttgactttctcctgtgggcaaaatggatgccccaaaccgctcgacaggccaggaaaatgaaggagataagcagcccagtgaattgccaattcttaatgcccgtcctaagaaaaagatataaatataaggcggtcagaatttactatgggcagaatcccactctggcgcaggcggctatagactgcacgacccctgagctttgtcctcaacaagacaatatgggcttttcactaccgccagagttgacatccattattttggagtacatttcccacgacgacctccatttagccaaatatgcaacaatcagtcgcgactggcaggcgatcatcgagagcaaaacattttcatccctcaaaatcaacacccccaagcggttagcagaattcaatgagctatcatgggaccgaagaaggagctatgttcgaaaaatcgatttgattattcaactggagtcatactatgatgatgacgacgcgttcacgcgctacgaaaatgaaggggagatgcaacgaaacaacaagattttcaccacatcgatccactcacttttcattactctggccaaatggccagcaaaagaagaagccgaatttagtctttcgattgaggcccggtcccccgatgatcttctaggtcaaacccctgaggcaaagagggagcgggaaaagcggatagaagaatcttacccaagcaatgatttccaggataagagattcgaaagatcataccttcaattcaatgaggaggtcgttggtgtcaaatgcccggccgtccccacaatcacttcccttgaaatcatgggagcgataaatagaaggaaaattgaaccagcttcttgttctttcatcgtgtcgaagtttcctcgactataccgcctggtgctttatttgaatgattcttgcaaatgggacccggaactgagaaaacgccatagaaacggtatgctacataacaatgcccggtagggtatgtgctaatcggaaatctagatttcgcggattctattctactatggcctgccagtatacggcagctccaccttgacttctgctatgtggcccctttcgatcaaaactattccccagcggcttcaactgtgaaaggaaaaacagacccgctaagctcgagattacgggagttctcgcaacaattgaaagaaatgggcggggcccaatgtgtgcttggaaaagaagtattctggcccacggatgaacagaatcacaatctccagcttcccttttggccccattttaccgatctgtggttaggatacgagccggtgactccaagtggaaactggatgttcgcaaaggaagaacctcaagaatctgaagatgaggatgattatgactcgagtgacccaggctcagactatagtgagatggatgataccgataaagattggattgccccggaggaccgtatgggcaaaatattccgaactaagcccattcacgagttgttcaatgcgtattatctctcagctgccaatgccgctctttgcatgcccaagctggataatatgtttttggaggtgacgaacggctggaatcgacacaagttttggtacagggtgagggatggagtagcgaatgcgacctggtctagtggtgatgatccgaaagcattcgagccaagcgatgaagtcttacaactctggaaacaggttgcttccgcgcgtactggaggtgatcttggagttgaatttgaccttctctgaggtagaagtttcattcgatcctgcaaagcgtttacaccgacatcaatatctgcaagtcactttaggaacaaagtggctctataacgaggatgaatggtggcaatctgtgcttaatcccttgacttcttcccgatgatcatgctgcaattgacaacccacaaagagcctgcgctgtaacccggtaccattcacaaatcaataagaatatggagtgaacgctatatatactttcaatctggcttgtattgtatataatattattatcttacaagaaagaattcatattcgaatattgccagtatcccaaacttaagctattgcgccagtacaataaggtaaatctaagacgagacaccgatgcagtaagcttcgttcaaccagaaactgttttcaaagaacattattagtattccacccaagtgaaccagaagggttcaacaacttacttttcgcaaacattgttcaaagccggattccaggtatctatgcgaatagttaatgtcgagcttcaacattattccgtaaatggagtctactcacaaagctgatcaactgtgatattgttacgagaagcgaacacttcgcatccatcaccgtgctgagccacatcgtatgcgttgcattcagagggaattcctgcctgggttggtgctggtggcgtcatagttgctcgggtagaggtagtcaccgcagtagagtgggtcgttatagcagtggtgggggctttcacacagtatgcttcatctacccaaaggccggcgcagttttctgtgattctgtgtgagtacaaggtacttatgtagtcggcagggatagaggatgattcgagaatatttacctccgacagccggattccatgcgttgaactgggcaagtgtgatgctatatgctgatgcaatcgccgtgcaagagtcgtttgtctgagccacgtaccactccaggcaatgggcaacaatgccagactgcgtcggggcagggggggccccggtggaagaagttgcggaagtgctagatgaagtggtgctcatgttatagctgacggtagaccagccatgtcccattacacaatactagacatattcgtataagctctgtttcggtttgacggccatgacgttgtttcttaccggggtattcatccaaaggttagtgcaatcagaccctaaaaatatgtaagaagcaaagaagacacaaccttcactgatgcaacataccaacacttggattccattcatacagtgacgtgaaaggaatgtcgtatgaccggcaaattgagtcacagtcatcgcctgtagtcaggtcctcctgatttagtattttatcgctgactcgtgggtcgacgtggactgaccgtctacagtttcataccaatcgagacattcagttgtagaattagccggggcatcagtcggaactgaagcccaaaccatcgtggaggttgaggccactggatagaagaagaatataagtatggtgtttgactcttttcgttgcaaagaaaaagactcacaagtttggttgtagaatgaaccacagtatcgtgtctcatttgtcagcttgcaattataaattgtgtagttctgcccgttcaagatactagggttccatagcaggaagtttgtcacactgacaccaaatatggacgccgcttcccaacatccaagcgcacccatgttgttattgaaagtggcaaaacatccgtccaaagagcccgaggccagtggatatgatgaagttgtcgtagttaggttgtaaacgggccgagtcgccgtgggaagattggcccaagttatggctggatcagctgtgaggcttgcgtacttggttgtggttgtggcatatccggagtaggtggctatatcaccgacagcctgtacacaataggagtagtctacggaacggaaatgagcccatccagaaacacaagaggaaggaaactagggaacacttaccgagaaagaggtttgtgcagttcgcgttgagttcagggttgaggaactcaaagtcatccagactaatcccattctggacagtgatcgaggcgcaattgtctagatcattagcaatgctcatagtgaagcgcaagataacgcaccattattcccaacactataccatttcgcacacttggcattagatccatcgacggcgttggtaggaatggaaacagcagttgcagtggtagaagcttcgaaagatgtactcggcttaacatatcccacattattgcccacacaaatcacatggtcaatcttggtgggccaattagcacagacaggatcgattgttggattccacgaaagaagctgtgtgagcgtaatcttatgagcacgtgaaacactgatgcaggtatcatttcgtcggaccaggtagggctgacaagttgcctgcacacacaggctcgtaaggtttcctggccaatttgtacagccaccaagtagtccattgaccattaaaagctgatcagttgcaaccgagtttgcctctgcaaattcatcacaagtgctgccagttggaacaggcacatatgatcctgtgcatgttaaagttgtagaagtgttgctgaccatagttcttttgatcaaggaaatatttagtcagtgaagccttactctatcaaggaggggtgcatacttggaattactgagaaatacgggcgtaggctcagccaacggcggtactgtgacaccacacgaagatgcagaggagaggtattggctagcaagccggtcaatccaccccaccgcattatcgagctgtgctctcataatgcccagaccgcaattcccgcatggatcgctttcgggctcaccggtggtgccgttcacaggcgaaaggtaacaaaatgcaggagggttggcgctgtatattcataagcaaagatatatcttgcaattggaggcaaccaacgcactcatcttgcatgcaggttacattgtagttaacaaaaaaaggatcaaccagcccgattggcttgatcgagattccttcaatattatagatatcatccttgactccagttccatagacataggaggtaccattgacgggctcgtcggtgtaaacatcatttgcacatgaggtcaagaccttcgatcggaaactggtgattgaatcgaaacacgctatagtgcacagagccgtgatattctctgcgctgagtccgctttgaaagtcggaatctcgaatgatatccgaacaatctacggtgctagctaatgcagcagcacaatcacttgaaaacatagtcaagtcggagatattgaagaatcctgttggtacagacattgtcgcggtgtctgccagcagcatatttgtgtggggagttgctacggtcgtcgctgcttcaagtaaagttgtagaagaaagcgcatctcggcgatggtgagccctttgatgcgcagcaatgtggtcgtggggacttgcgacgacaaatggtatacaaatggggagaagacccaatccaagtacttgacaccaaagtggtgtcatgaagagccgcatagtataccaagtgatgggaatgaaggagagttgggagacatatgctggctcaatatagcaaagaaagagggaaaacgtatctttcgctccatcgaacattctaatttcctcgtttaaccatgctcgcctgtggatcccacggacctacagatttctccgtcactagatacgatattttactccctaagctccattcaccgcgctgtgtagcgtgaacatcaagaatccgctgtttcgcaatcttaagtcagttgatacgacactgcgtttgttggggccgaggagccggatggtgattggtatccgactttggctggtaaactaattggtttcaagatccttgattactggttttagccccattcaattctacaaagtaaagacactacataaatgactccactagtggctccacacttgtgtcgcagttgcaagaaggtccacatgaatctgctgcggtgttctggcttttttaacatgactgcgcgctctttgtttttattttattttaaatcgctagcaatgagatgtacaatgtattgcatgcagggtactcaaccacgggaagcaaacagcatgattatatgtataggatttgtgggcctcggcaacgacggaagaccttgcccatcaggggtagtagaaaatattacctttcaacggacccttcataatgcatttctcggttcatgtccgaagggcggaattcatacaacagatccgtatggaaaaaaagccaaggaggccaagcaaacttggcccccgataaggatgaaaatcaagagaaaacgtaggcttatccttattggcgtgtggctggctttgggggccaaaatactactaactatatccactctcgcaatctattccgcttcacactaatccctcaaagaatccgtggacgttggcccactttttagttcttcgtttacattaatatcacgcaataaaaaatggttcggctgctagcttgctatcgatggattgtatctgccaccgattgtcctgtctcgatcaagaatcaagagacagtggggcaggcaaatctcgggaatggatgctgcggacggagtcgcagtcggggtgaccgttagtctaacgctactgtaattgcgataacttgaatctatttagccccgagagcaaagacaactcgccctctcttctatataggaaatcatagagcctaagtacatataaaa

SEQ ID NO: 27 - DNA, 14607 bp, Penicillium roqueforti
  misc_feature (1549)..(7460): n is a, c, g, or t
taccagcactccatctaccagcactccatctaccagcacttcatctactactactacgaaagatagccatctcactatcgtcactgttgcttctgtcactagcacttctactagtattgtttgggtcacagtgtagatagtggaggttacacacacacacacacacacaatttattaacgcccggccactaagcggaaagggcaactatctctgatctactatacatgtcataatagatatagtactgtgtctcctcaaagcccatacaaaaagccttgcaatatatgtcatctcagatgtccgtattgcagcggatcctcgtgggttagtaattttgttagtagactggcttgaaggcgcttctccaagtgttcaacatcctattttcggcagctgaagcgcgtctaccatctgtaaggcgaggtggttggtgggtcagatcggcgaaagggggtgatttatgttcgttggcatggttaggtggcctcgagtcggcccgtggcgatggcgaatcgtattgaggcccgtaccgcctctaagtttggcgtccacttctgatcatcggaaggcgactttcctcctagaaagaaggatatatttctcggtgagtgttggtacattgtagtagttccgtccagtgcgccgtccatttttgacatcgaaataggaagtgctccacggtctctctcgcttgtccacacgcacactggtccgtgtctgctacgttgattcgatagagatatccattgagtcttgccagccagcacgctcgcttctttccacgataatcggtcatatagctgccgggtgtcaagtattgatttgtattactaagttgggcacgcttgataatacattgtagaggcggcagcatgtctacctacatagaccctctccattgcatccccttcgatcctcatccgcatccttcacggggcacagccagttccgcaagtcaataccagtttgcaccttaagcctacttccatagcggccttgaagtctccatcctcgaagccatcttcaaaatcctattctctcagtagaccgacacgcgcgtccgtcctctcgagccatatagaaagtgtcgtatctgcagtccgcccacccagtcttccgtcgcttccattatatgctgcgccccgcggattgtcaaatccatttcgcgctaccttgcaagatctctttgacaaggccgaccatgtctcgcaggagtttgcccagttgtatcctctctgtacacagagcagccaagcaacacagtgttgtccctcccaccaaccaaactacctcgtcgttctctgtgtggattcaaggatgctgggtcgtgtcgtgtcgttcgtggttttgcttttggctctgtcgtttgtgtatcctcagacccagcgatatcctcctttcaacagagcagcccgagagcaccccaagggtgtcctatcccacgaccctagtgtccactgattgtaggatcggtttcgcagtcgtgtgtcgggtggttttcaaagtgttcccttgtcgcctgtgcgtgggggcagggcccccgacccnnnnnnnnnnnnnnnnnnnnnnnnnnnnnnnnnnnnnnnnnnnnnnnnnnnnnnnnnnnnnnnnnnnnnnnnnnnnnnnnnnnnnnnnnnnnnnnnnnnnnnnnnnnnnnnnnnnnnnnnnnnnnnnnnnnnnnnnnnnnnnnnnnnnnnnnnnnnnnnnnnnnnnnnnnnnnnnnnnnnnnnnnnnnnnnnnnnnnnnnnnnnnnnnnnnnnnnnnnnnnnnnnnnnnnnnnnnnnnnnnnnnnnnnnnnnnnnnnnnnnnnnnnnnnnnnnnnnnnnnnnnnnnnnnnnnnnnnnnnnnnnnnnnnnnnnnnnnnnnnnnnnnnnnnnnnnnnnnnnnnnnnnnnnnnnnnnnnnnnnnnnnnnnnnnnnnnnnnnnnnnnnnnnnnnnnnnnnnnnnnnnnnnnnnnnnnnnnnnnnnnnnnnnnnnnnnnnnnnnnnnnnnnnnnnnnnnnnnnnnnnnnnnnnnnnnnnnnnnnnnnnnnnnnnnnnnnnnnnnnnnnnnnnnnnnnnnnnnnnnnnnnnnnnnnnnnnnnnnnnnnnnnnnnnnnnnnnnnnnnnnnnnnnnnnnnnnnnnnnnnnnnnnnnnnnnnnnnnnnnnnnnnnnnnnnnnnnnnnnnnnnnnnnnnnnnnnnnnnnnnnnnnnnnnnnnnnnnnnnnnnnnnnnnnnnnnnnnnnnnnnnnnnnnnnnnnnnnnnnnnnnnnnnnnnnnnnnnnnnnnnnnnnnnnnnnnnnnnnnnnnnnnnnnnnnnnnnnnnnnnnnnnnnnnnnnnnnnnnnnnnnnnnnnnnnnnnnnnnnnnnnnnnnnnnnnnnnnnnnnnnnnnnnnnnnnnnnnnnnnnnnnnnnnnnnnnnnnnnnnnnnnnnnnnnnnnnnnnnnnnnnnnnnnnnnnnnnnnnnnnnnnnnnnnnnnnnnnnnnnnnnnnnnnnnnnnnnnnnnnnnnnnnnnnnnnnnnnnnnnnnnnnnnnnnnnnnnnnnnnnnnnnnnnnnnnnnnnnnnnnnnnnnnnnnnnnnnnnnnnnnnnnnnnnnnnnnnnnnnnnnnnnnnnnnnnnnnnnnnnnnnnnnnnnnnnnnnnnnnnnnnnnnnnnnnnnnnnnnnnnnnnnnnnnnnnnnnnnnnnnnnnnnnnnnnnnnnnnnnnnnnnnnnnnnnnnnnnnnnnnnnnnnnnnnnnnnnnnnnnnnnnnnnnnnnnnnnnnnnnnnnnnnnnnnnnnnnnnnnnnnnnnnnnnnnnnnnnnnnnnnnnnnnnnnnnnnnnnnnnnnnnnnnnnnnnnnnnnnnnnnnnnnnnnnnnnnnnnnnnnnnnnnnnnnnnnnnnnnnnnnnnnnnnnnnnnnnnnnnnnnnnnnnnnnnnnnnnnnnnnnnnnnnnnnnnnnnnnnnnnnnnnnnnnnnnnnnnnnnnnnnnnnnnnnnnnnnnnnnnnnnnnnnnnnnnnnnnnnnnnnnnnnnnnnnnnnnnnnnnnnnnnnnnnnnnnnnnnnnnnnnnnnnnnnnnnnnnnnnnnnnnnnnnnnnnnnnnnnnnnnnnnnnnnnnnnnnnnnnnnnnnnnnnnnnnnnnnnnnnnnnnnnnnnnnnnnnnnnnnnnnnnnnnnnnnnnnnnnnnnnnnnnnnnnnnnnnnnnnnnnnnnnnnnnnnnnnnnnnnnnnnnnnnnnnnnnnnnnnnnnnnnnnnnnnnnnnnnnnnnnnnnnnnnnnnnnnnnnnnnnnnnnnnnnnnnnnnnnnnnnnnnnnnnnnnnnnnnnnnnnnnnnnnnnnnnnnnnnnnnnnnnnnnnnnnnnnnnnnnnnnnnnnnnnnnnnnnnnnnnnnnnnnnnnnnnnnnnnnnnnnnnnnnnnnnnnnnnnnnnnnnnnnnnnnnnnnnnnnnnnnnnnnnnnnnnnnnnnnnnnnnnnnnnnnnnnnnnnnnnnnnnnnnnnnnnnnnnnnnnnnnnnnnnnnnnnnnnnnnnnnnnnnnnnnnnnnnnnnnnnnnnnnnnnnnnnnnnnnnnnnnnnnnnnnnnnnnnnnnnnnnnnnnnnnnnnnnnnnnnnnnnnnnnnnnnnnnnnnnnnnnnnnnnnnnnnnnnnnnnnnnnnnnnnnnnnnnnnnnnnnnnnnnnnnnnnnnnnnnnnnnnnnnnnnnnnnnnnnnnnnnnnnnnnnnnnnnnnnnnnnnnnnnnnnnnnnnnnnnnnnnnnnnnnnnnnnnnnnnnnnnnnnnnnnnnnnnnnnnnnnnnnnnnnnnnnnnnnnnnnnnnnnnnnnnnnnnnnnnnnnnnnnnnnnnnnnnnnnnnnnnnnnnnnnnnnnnnnnnnnnnnnnnnnnnnnnnnnnnnnnnnnnnnnnnnnnnnnnnnnnnnnnnnnnnnnnnnnnnnnnnnnnnnnnnnnnnnnnnnnnnnnnnnnnnnnnnnnnnnnnnnnnnnnnnnnnnnnnnnnnnnnnnnnnnnnnnnnnnnnnnnnnnnnnnnnnnnnnnnnnnnnnnnnnnnnnnnnnnnnnnnnnnnnnnnnnnnnnnnnnnnnnnnnnnnnnnnnnnnnnnnnnnnnnnnnnnnnnnnnnnnnnnnnnnnnnnnnnnnnnnnnnnnnnnnnnnnnnnnnnnnnnnnnnnnnnnnnnnnnnnnnnnnnnnnnnnnnnnnnnnnnnnnnnnnnnnnnnnnnnnnnnnnnnnnnnnnnnnnnnnnnnnnnnnnnnnnnnnnnnnnnnnnnnnnnnnnnnnnnnnnnnnnnnnnnnnnnnnnnnnnnnnnnnnnnnnnnnnnnnnnnnnnnnnnnnnnnnnnnnnnnnnnnnnnnnnnnnnnnnnnnnnnnnnnnnnnnnnnnnnnnnnnnnnnnnnnnnnnnnnnnnnnnnnnnnnnnnnnnnnnnnnnnnnnnnnnnnnnnnnnnnnnnnnnnnnnnnnnnnnnnnnnnnnnnnnnnnnnnnnnnnnnnnnnnnnnnnnnnnnnnnnnnnnnnnnnnnnnnnnnnnnnnnnnnnnnnnnnnnnnnnnnnnnnnnnnnnnnnnnnnnnnnnnnnnnnnnnnnnnnnnnnnnnnnnnnnnnnnnnnnnnnnnnnnnnnnnnnnnnnnnnnnnnnnnnnnnnnnnnnnnnnnnnnnnnnnnnnnnnnnnnnnnnnnnnnnnnnnnnnnnnnnnnnnnnnnnnnnnnnnnnnnnnnnnnnnnnnnnnnnnnnnnnnnnnnnnnnnnnnnnnnnnnnnnnnnnnnnnnnnnnnnnnnnnnnnnnnnnnnnnnnnnnnnnnnnnnnnnnnnnnnnnnnnnnnnnnnnnnnnnnnnnnnnnnnnnnnnnnnnnnnnnnnnnnnnnnnnnnnnnnnnnnnnnnnnnnnnnnnnnnnnnnnnnnnnnnnnnnnnnnnnnnnnnnnnnnnnnnnnnnnnnnnnnnnnnnnnnnnnnnnnnnnnnnnnnnnnnnnnnnnnnnnnnnnnnnnnnnnnnnnnnnnnnnnnnnnnnnnnnnnnnnnnnnnnnnnnnnnnnnnnnnnnnnnnnnnnnnnnnnnnnnnnnnnnnnnnnnnnnnnnnnnnnnnnnnnnnnnnnnnnnnnnnnnnnnnnnnnnnnnnnnnnnnnnnnnnnnnnnnnnnnnnnnnnnnnnnnnnnnnnnnnnnnnnnnnnnnnnnnnnnnnnnnnnnnnnnnnnnnnnnnnnnnnnnnnnnnnnnnnnnnnnnnnnnnnnnnnnnnnnnnnnnnnnnnnnnnnnnnnnnnnnnnnnnnnnnnnnnnnnnnnnnnnnnnnnnnnnnnnnnnnnnnnnnnnnnnnnnnnnnnnnnnnnnnnnnnnnnnnnnnnnnnnnnnnnnnnnnnnnnnnnnnnnnnnnnnnnnnnnnnnnnnnnnnnnnnnnnnnnnnnnnnnnnnnnnnnnnnnnnnnnnnnnnnnnnnnnnnnnnnnnnnnnnnnnnnnnnnnnnnnnnnnnnnnnnnnnnnnnnnnnnnnnnnnnnnnnnnnnnnnnnnnnnnnnnnnnnnnnnnnnnnnnnnnnnnnnnnnnnnnnnnnnnnnnnnnnnnnnnnnnnnnnnnnnnnnnnnnnnnnnnnnnnnnnnnnnnnnnnnnnnnnnnnnnnnnnnnnnnnnnnnnnnnnnnnnnnnnnnnnnnnnnnnnnnnnnnnnnnnnnnnnnnnnnnnnnnnnnnnnnnnnnnnnnnnnnnnnnnnnnnnnnnnnnnnnnnnnnnnnnnnnnnnnnnnnnnnnnnnnnnnnnnnnnnnnnnnnnnnnnnnnnnnnnnnnnnnnnnnnnnnnnnnnnnnnnnnnnnnnnnnnnnnnnnnnnnnnnnnnnnnnnnnnnnnnnnnnnnnnnnnnnnnnnnnnnnnnnnnnnnnnnnnnnnnnnnnnnnnnnnnnnnnnnnnnnnnnnnnnnnnnnnnnnnnnnnnnnnnnnnnnnnnnnnnnnnnnnnnnnnnnnnnnnnnnnnnnnnnnnnnnnnnnnnnnnnnnnnnnnnnnnnnnnnnnnnnnnnnnnnnnnnnnnnnnnnnnnnnnnnnnnnnnnnnnnnnnnnnnnnnnnnnnnnnnnnnnnnnnnnnnnnnnnnnnnnnnnnnnnnnnnnnnnnnnnnnnnnnnnnnnnnnnnnnnnnnnnnnnnnnnnnnnnnnnnnnnnnnnnnnnnnnnnnnnnnnnnnnnnnnnnnnnnnnnnnnnnnnnnnnnnnnnnnnnnnnnnnnnnnnnnnnnnnnnnnnnnnnnnnnnnnnnnnnnnnnnnnnnnnnnnnnnnnnnnnnnnnnnnnnnnnnnnnnnnnnnnnnnnnnnnnnnnnnnnnnnnnnnnnnnnnnnnnnnnnnnnnnnnnnnnnnnnnnnnnnnnnnnnnnnnnnnnnnnnnnnnnnnnnnnnnnnnnnnnnnnnnnnnnnnnnnnnnnnnnnnnnnnnnnnnnnnnnnnnnnnnnnnnnnnnnnnnnnnnnnnnnnnnnnnnnnnnnnnnnnnnnnnnnnnnnnnnnnnnnnnnnnnnnnnnnnnnnnnnnnnnnnnnnnnnnnnnnnnnnnnnnnnnnnnnnnnnnnnnnnnnnnnnnnnnnnnnnnnnnnnnnnnnnnnnnnnnnnnnnnnnnnnnnnnnnnnnnnnnnnnnnnnnnnnnnnnnnnnnnnnnnnnnnnnnnnnnnnnnnnnnnnnnnnnnnnnnnnnnnnnnnnnnnnnnnnnnnnnnnnnnnnnnnnnnnnnnnnnnnnnnnnnnnnnnnnnnnnnnnnnnnnnnnnnnnnnnnnnnnnnnnnnnnnnnnnnnnnnnnnnnnnnnnnnnnnnnnnnnnnnnnnnnnnnnnnnnnnnnnnnnnnnnnnnnnnnnnnnnnnnnnnnnnnnnnnnnnnnnnnnnnnnnnnnnnnnnnnnnnnnnnnnnnnnnnnnnnnnnnnnnnnnnnnnnnnnnnnnnnnnnnnnnnnnnnnnnnnnnnnnnnnnnnnnnnnnnnnnnnnnnnnnnnnnnnnnnnnnnnnnnnnnnnnnnnnnnnnnnnnnnnnnnnnnnnnnnnnnnnnnnnnnnnnnnnnnnnnnnnnnnnnnnnnnnnnnnnnnnnnnnnnnnnnnnnnnnnnnnnnnnnnnnnnnnnnnnnnnnnnnnnnnnnnnnnnnnnnnnnnnnnnnnnnnnnnnnnnnnnnnnnnnnnnnnnnnnnnnnnnnnnnnnnnnnnnnnnnnnnnnnnnnnnnnnnnnnnnnnnnnnnnnnnnnnnnnnnnnnnnnnnnnnnnnnnnnnnnnnnnnnnnnnnnnnnnnnnnnnnnnnnnnnnnnnnnnnnnnnnnnnnnnnnnnnnnnnnnnnnnnnnnnnnnnnnnnnnnnnnnnnnnnnnnnnnnnnnnnnnnnnnnnnnnnnnnnnnnnnnnnnnnnnnnnnnnnnnnnnnnnnnnnnnnnnnnnnnnnnnnnnnnnnnnnnnnnnnnnnnnnnnnnnnnnnnnnnnnnnnnnnnnnnnnnnnnnnnnnnnnnnnnnnnnnnnnnnnnnnnnnnnnnnnnnnnnnnnnnnnnnnnnnnnnnnnnnnnnnnnnnnnnnnnnnnnnnnnnnnnnnnnnacacacacacacacaattcattaacgcccggcggctgagccgaaagggcaactatcgctaaactactatacatgtcatagtatatacaattctgtgactcattggagcccatacacaagaccttggcgtatttgtcattctcagcatgcagtgtcgcagcggatgctcgtgggttagtaagttggttagtagactggcttgaaggcgcttctccaagtgttcaacatcctatcttcggcagttgaagcgcgtctaccgtctgtcgcagggggttggggttagtaagatggtgattttgtccgttcgtcggcaaggttaagtggcctcaagtcggcccgtagcgatcgcaaatcgtattgaggctcgcactgcatccaaattcggcgtccacttctggtcatcggaaggcaattttccacccaagaagaaggagatattacttcggtgagtgtgggtacattgcaacatttccgtccggtgcgcggtccacttccgacatcgaaagagaaagtggtccaccgtctctcttgcttgtccacatgcacattgatctgtctcggcggcattgattcgaaagagatatccattgagtcttgccatacccgtgcggagttgggctaacacgcttgcttctttccacgatagtcggtcatacaactgtcgcgtgtgttttcctggaagggctttatccactcgtctcgaatgtttcccgatgctctcgggtagcttactgctggggattgcttgggtacgcgcgatctttagagtcgtcgatttcattttcgggacctgtccttgcaaaaaatatatacagtagtattcgaaatcagctataccttttcactcttgcgacttgattcccggaaaataaatccgagggttgtgagttctgattggataggaagcgaaggcgccgcctttcagaccgctttctagattgataggagtatcttacaatacagtattaagacatgactagacgtattttacaggaaagtgctatacgcttgctacctggtatgcccctcaattcatgcacaaggcagattcccccccgtcaccatccggctttctgcgacatttcagtgttcaatatcaggcaaaacgacatggctcctagactccctacttcgaagctccatctgatccgtgatatgatagaaagccagtccttcaccacgtctcagatggccgaagaagctgaatgtaccaggcttacgatcattaatattcgcagaaatctacgccaatttggagccatccatgcccctcaaacccgaatcggccgaaaacgaaccgttacaccgctgatgataaatgctctttgtgaccacctttccgagaagcctggtctctacctcgatgagatggcggtcttcttgtgggatgagtttcaaaccatgattacaacctccagcattagaagagcccttgtagcaacaggttggtcgaaaaaggtagtgcgccagcgcgctaaagagcagaacgcggacttgagagactactacctacacaatttatcggagtttcagtcgtatcacctgatatatgttgatgaatctggatgtgataaacgggtcggattcaggcgcaccggttgggcacctcttggcaaagctcctctgcaagtaacacagttccaccgcgaccagcgatatcaaatactacctgcgtatactcaagatggaatcctcctctcgcgtgtatttcgcggctctacagatgctactgtgttcgagggcttcatatcccagcttctgcagcattgcggaaggtggccagagcccaaatctgtcctcgtgatggataatgcatccttccaccactcagagcggcttctacagatgtgtgaggaggccggggtgaaattagtttacctgccgccttattcgccggacctgaatccgattgaagagttctttgctgagcttaaaggtttcatcaggcgtaattggaattactatgaaagagaccctagtcaaggatttgatgttttcttggaatggtgcatcaatgtggttggcgcaaaagaagaaagtgcccgaggtcattttcgtcatgcaggcttaaaaatcgaaaatattggagcttaaagatcaggcatgttgtgttcgatatgcgtcacaagtggaagacaaagaacgtcccacagtaacaatcaaaatcgcattttcctctgtgctgtcctggagtcccccggtgcccaaattgaacgcacaattggactatggtttcggccgcttggctcataataaacaaacgttcactgtttaccatataatagttgcaacttgggaagttagattgtagataatgcaagaattctcaactactttattgatctatacagctgtttttctgtaaaagcagaccaaaagcagacactaaactagaataggtgaaaccttcagattggtattgatcctagcctaacaattgagaagcaggtagctagattaaatagtccagttggtttcttcggctgcaagcattcctagataccaaatgcccattagcacagtgagctgaccatggcctccagctgtccaggggattgacatagagacggctagactgccgtttgtatcgagacgtttgaccccaatcagctcagtgttggtaagcacaaagccatggcgcgctttgtgttggcccatgtagaaattcacctgtgaaagaacctgcttgtattgttcttgaaagatggggttttgcgaatggcggtagtcagagcgccatttccacgagaccttcatatcccctggggcccggttcgtgctgtcggcgtaggtgcccccgagagtgacgaaggcagtgtctggtcgaaactggtcgacgtacgctgctgagcccccaccgtcaaaagtgatcggcacaaggctaagttgctgcagccggggtgcgagctcctcgaacccggcgcgcagtgcgcgcctgacacggggttgaagcagctcggcaaatcgaagatgaaaatgaggctcatccctaattgcggcaggaggggacctgaagggatcggatgcgatctgctttgagttcaaaatcccgccatatcgttgaatgatcgttgtataattgaactctggccaatcgacaacctgggtgatgtcttccgccccatagcgggggttcgttgtattccgcgatggggcagaaccttgaataggaattgccgggagggaaatagagagatactgtaaaagagattggttgttcatattgcagtagtagagtaccacgtctggtgaatatgacttaggagtaatagcctcaggtggtggatacctaatgatagctgatcgtcgagataggcaagaagaatcaggatagagaaataaaatgatgggcttgggaggaaaggaaaatatagggagaatatccgatccaaaattacacatatatctgataggcaatcaatagcgatgtttttggatatagttgattggtgtgactactacagtaagcgctctcacttgaagtgtatcccttggcataagcagagtgaaagaaaacgacaagtgaaaccccgagcgaaccttggatttagagatgtggtgaatctagtggctcaagaggtcttgaaaaaaaaagcgttcattggaaccctggatcaggatcatagtcgatggggcctcaagcacccgccttctcgtttcagtctcagagggcgcttacatgcagccactgaaaccgacccactctgatatttcctcctaccagcggcaacgtagtggatttgattcgcgaggtctgggtttgggatccacatgacccaaagtcaaacttacataatccggctattagtaaccaagacctgtcccattttcgttgcctgacctgcttcaacctctttggaaacgtaacttttcgacaggacaacaatgcacctaagaagtgcttccttaacggacatgaatccctccaaaatccatctaatcagggagattacgtgctctgatgcgtcttcaatattcgaggtagatatggatggacaaaagtatgctttgaagcttttccacgacaacggcgaccctggatataccgaaaaaggtcgtgatttgaaccgatttcgctgcgaactcaatgcatataagaagctttttgcctctggtgtttgtgcgcgcagtttcgttccaaaattctacggctacatcaatcgaatggatcccgcagcatttcatcctgctttccaacatttctctcaagacaagctcaagccgagagcaatattgctagagtacctcccaaatgcagagagcttaaactgcattaactactcggatacgctctatcctcaggcaattgagggcatgaaggagatacacagggcgggcgttcaccacagagacatctacccgagaaatcttctccttgttcgtggagaccctgataggctggtctggactgattttgatgtttcaacgaccttcaccgactttggacctgaacagttggcccgctgtgactacgaaattgcccttgtgaagggatttggagaagcactggtaaggactccgctgctccctatgttggaagcagttagcgtgctgactgacgaatgcagagagatgaccaggctgagggactcccgcctaatacaaaattctattaaggattctataggcctacgaatattccgacaatgtttgatcgcgttcatatgtacgttcttgtaatagatgagttgggcagagctctgagtatgggctgttttcattcggcttactttattttacttcattcttaaaatgtggggttatgtaccgtacagagaaatgcagacctttagaaacccaaagatgtcaagacctgcggcgagacatgtccatcgtagattagaattctatcacgatcgtctaaggggcgcaccgatactgtaggacattaaccgcaaaattcttgtttcttcaccatccgcacctgctacggtgtgtctcgaaactggtgtacccttgtacacacttcaagagattctcgagccccacctgccaatatacactagtctacgttggaaattcttccgagtacccctgttagaatgattctgttgattcaagcaaggccatatctccagaggtcaagaatggataattgacatgactggaggttctctcgagaccatcctttcttcagcctcacttttcccatgctctcatttgccccattggtattcgaatttcttgaattcaaatggcttgtattcaactgtggaaaggggtagcgcttgtctgaggctggacgacacactcaaatacttttccatagtcgctatacataattcagcagcaaacgctggatatgctttcaagagatcgtaatcaatccccggggtcagccctccttgaagttctcgcaggtttttcacaatcagtttgttcgctagcttcctaatatctcggtagtcggcatttgttgaatagagttccttgattgcctgcgccaagatttgcttttcggagcaattttcaaatgaatctcgaaagttctcttctgctttgatcttcagatcttcgatcatgaagtaatccgcttctccatacatgcggagatggaagtagcatgggtggcaatcagtcaatgattcgtcgatagcgtccatttgctcgctggagcctgtcagggggccctcgccagctactgaagtctttttgttcactgagcattggttcataagactcgctgtaggttgatttgacagtgacattgcagtttcaccaacggcaccctccccagctgaaaggttctccatgtcatcttggtctttttgagagagtcgcaaagcctcttccgaatgccatgtatctgattctggtattttgtcgctatcgcttggtaaaatctgaacttcagtcatattgtcttgaactgtgtagtctcccgtgtaaagaaactctagcatcttctcgactagtgtcgggcttctagtatccaaagtgacagatccccgggattcctgtgagtcagtcacataagcttcggtctgagtgttccacaagattctgcctgaatttacaatacctcgaaagaaccacaacaggcgctttgaaaatacttggatctgggacacagaacaagcttatgagctgggaagactcgaccttggcaaaagatcttgagatcgctgtaatcggggttgaggtggaggctttgtgaagatgagcggaactcaagagtaaaaacttgccattactctagagaatctttatagttcttacctagcaatgatacccaaaacgacatcttggtactgtctctgttgcattttatcttgaatgacggcagtgggcttaggggggtcaggagcaggatcactgtccgttgatgaccttgatgaattgtgtcttctgtttcttctgttaaccatagtttggaaataatagaaaataccaaaaattagtcggttaagcggacgtacggcgagacggcaagtaagctatatgtctctgaaaactgcgcgccagatgcacagctgcccgaccccgccttttggttgaacaacaccagcaagtcgtgttcgtgactcaccgctggactgataggagggatctcttagggattcgacgtatcatatataaggcagttcgctccggtaatattcattgttgttagaaggggtgtgggtcatcccctaaaggcagaaaatgccagtgaggactctattgacatggtcatgtgttagcttccaccaaggatatggtcagcaagtagacaaagtagtggctgacaggctaaatactctgacaagtaggtgcataagtggtctgtagatacagcacagtaagaaaaaaatatgtcacttttcttgagctttggtgccgggtaagagccccagaccgtcactcggacataagagcggcaaggagatgtgatagctctccggattaccgaggagtctccagctcttttgtttaactcatttgcattgggatggaaaattcaagctacttttggattcccaatatggcaacaagggtacagtatttcgtgaaaggcgaatgatggattgggactaatacaggaatattaatattccggatttatccctgatacagactagcttacattttgaagtggggccgaggaatttctcaaagtagaggatagtgcaccggtttcgagacgtactgtatagctcgtacagtat

SEQ ID NO: 28 - DNA, 12359 bp, Penicillium roqueforti
  misc_feature (511)..(6228): n is a, c, g, or t
tatattttatatacttataattataatatcttaagaactataaggaaagagaagggtatcattttataaaattataaacctattttttactaaccgaaagaactagggtagttccgcgctttttaagaagaagattcactatttcttatactatagagggctggggagctaatctacgagaatctatagagagaatctatttttaaagagattcctctttaattacagttaatttagataagttagcgtatatagtacttcgttaagaatagctagagaggcagtcgcgtaaagttatatataggatactaaaagtatatacagtaagagtaatagagctaatatctctattttaaagagcctagatagctaataaaagcctgccctcttactattctaatttactagcggattgagagcgaattagtggcatagtaggtagttgaacttgtcagaatctaggatgaatactgtcatttttcatccctgatacagttggatcacgtgactnnnnnnnnnnnnnnnnnnnnnnnnnnnnnnnnnnnnnnnnnnnnnnnnnnnnnnnnnnnnnnnnnnnnnnnnnnnnnnnnnnnnnnnnnnnnnnnnnnnnnnnnnnnnnnnnnnnnnnnnnnnnnnnnnnnnnnnnnnnnnnnnnnnnnnnnnnnnnnnnnnnnnnnnnnnnnnnnnnnnnnnnnnnnnnnnnnnnnnnnnnnnnnnnnnnnnnnnnnnnnnnnnnnnnnnnnnnnnnnnnnnnnnnnnnnnnnnnnnnnnnnnnnnnnnnnnnnnnnnnnnnnnnnnnnnnnnnnnnnnnnnnnnnnnnnnnnnnnnnnnnnnnnnnnnnnnnnnnnnnnnnnnnnnnnnnnnnnnnnnnnnnnnnnnnnnnnnnnnnnnnnnnnnnnnnnnnnnnnnnnnnnnnnnnnnnnnnnnnnnnnnnnnnnnnnnnnnnnnnnnnnnnnnnnnnnnnnnnnnnnnnnnnnnnnnnnnnnnnnnnnnnnnnnnnnnnnnnnnnnnnnnnnnnnnnnnnnnnnnnnnnnnnnnnnnnnnnnnnnnnnnnnnnnnnnnnnnnnnnnnnnnnnnnnnnnnnnnnnnnnnnnnnnnnnnnnnnnnnnnnnnnnnnnnnnnnnnnnnnnnnnnnnnnnnnnnnnnnnnnnnnnnnnnnnnnnnnnnnnnnnnnnnnnnnnnnnnnnnnnnnnnnnnnnnnnnnnnnnnnnnnnnnnnnnnnnnnnnnnnnnnnnnnnnnnnnnnnnnnnnnnnnnnnnnnnnnnnnnnnnnnnnnnnnnnnnnnnnnnnnnnnnnnnnnnnnnnnnnnnnnnnnnnnnnnnnnnnnnnnnnnnnnnnnnnnnnnnnnnnnnnnnnnnnnnnnnnnnnnnnnnnnnnnnnnnnnnnnnnnnnnnnnnnnnnnnnnnnnnnnnnnnnnnnnnnnnnnnnnnnnnnnnnnnnnnnnnnnnnnnnnnnnnnnnnnnnnnnnnnnnnnnnnnnnnnnnnnnnnnnnnnnnnnnnnnnnnnnnnnnnnnnnnnnnnnnnnnnnnnnnnnnnnnnnnnnnnnnnnnnnnnnnnnnnnnnnnnnnnnnnnnnnnnnnnnnnnnnnnnnnnnnnnnnnnnnnnnnnnnnnnnnnnnnnnnnnnnnnnnnnnnnnnnnnnnnnnnnnnnnnnnnnnnnnnnnnnnnnnnnnnnnnnnnnnnnnnnnnnnnnnnnnnnnnnnnnnnnnnnnnnnnnnnnnnnnnnnnnnnnnnnnnnnnnnnnnnnnnnnnnnnnnnnnnnnnnnnnnnnnnnnnnnnnnnnnnnnnnnnnnnnnnnnnnnnnnnnnnnnnnnnnnnnnnnnnnnnnnnnnnnnnnnnnnnnnnnnnnnnnnnnnnnnnnnnnnnnnnnnnnnnnnnnnnnnnnnnnnnnnnnnnnnnnnnnnnnnnnnnnnnnnnnnnnnnnnnnnnnnnnnnnnnnnnnnnnnnnnnnnnnnnnnnnnnnnnnnnnnnnnnnnnnnnnnnnnnnnnnnnnnnnnnnnnnnnnnnnnnnnnnnnnnnnnnnnnnnnnnnnnnnnnnnnnnnnnnnnnnnnnnnnnnnnnnnnnnnnnnnnnnnnnnnnnnnnnnnnnnnnnnnnnnnnnnnnnnnnnnnnnnnnnnnnnnnnnnnnnnnnnnnnnnnnnnnnnnnnnnnnnnnnnnnnnnnnnnnnnnnnnnnnnnnnnnnnnnnnnnnnnnnnnnnnnnnnnnnnnnnnnnnnnnnnnnnnnnnnnnnnnnnnnnnnnnnnnnnnnnnnnnnnnnnnnnnnnnnnnnnnnnnnnnnnnnnnnnnnnnnnnnnnnnnnnnnnnnnnnnnnnnnnnnnnnnnnnnnnnnnnnnnnnnnnnnnnnnnnnnnnnnnnnnnnnnnnnnnnnnnnnnnnnnnnnnnnnnnnnnnnnnnnnnnnnnnnnnnnnnnnnnnnnnnnnnnnnnnnnnnnnnnnnnnnnnnnnnnnnnnnnnnnnnnnnnnnnnnnnnnnnnnnnnnnnnnnnnnnnnnnnnnnnnnnnnnnnnnnnnnnnnnnnnnnnnnnnnnnnnnnnnnnnnnnnnnnnnnnnnnnnnnnnnnnnnnnnnnnnnnnnnnnnnnnnnnnnnnnnnnnnnnnnnnnnnnnnnnnnnnnnnnnnnnnnnnnnnnnnnnnnnnnnnnnnnnnnnnnnnnnnnnnnnnnnnnnnnnnnnnnnnnnnnnnnnnnnnnnnnnnnnnnnnnnnnnnnnnnnnnnnnnnnnnnnnnnnnnnnnnnnnnnnnnnnnnnnnnnnnnnnnnnnnnnnnnnnnnnnnnnnnnnnnnnnnnnnnnnnnnnnnnnnnnnnnnnnnnnnnnnnnnnnnnnnnnnnnnnnnnnnnnnnnnnnnnnnnnnnnnnnnnnnnnnnnnnnnnnnnnnnnnnnnnnnnnnnnnnnnnnnnnnnnnnnnnnnnnnnnnnnnnnnnnnnnnnnnnnnnnnnnnnnnnnnnnnnnnnnnnnnnnnnnnnnnnnnnnnnnnnnnnnnnnnnnnnnnnnnnnnnnnnnnnnnnnnnnnnnnnnnnnnnnnnnnnnnnnnnnnnnnnnnnnnnnnnnnnnnnnnnnnnnnnnnnnnnnnnnnnnnnnnnnnnnnnnnnnnnnnnnnnnnnnnnnnnnnnnnnnnnnnnnnnnnnnnnnnnnnnnnnnnnnnnnnnnnnnnnnnnnnnnnnnnnnnnnnnnnnnnnnnnnnnnnnnnnnnnnnnnnnnnnnnnnnnnnnnnnnnnnnnnnnnnnnnnnnnnnnnnnnnnnnnnnnnnnnnnnnnnnnnnnnnnnnnnnnnnnnnnnnnnnnnnnnnnnnnnnnnnnnnnnnnnnnnnnnnnnnnnnnnnnnnnnnnnnnnnnnnnnnnnnnnnnnnnnnnnnnnnnnnnnnnnnnnnnnnnnnnnnnnnnnnnnnnnnnnnnnnnnnnnnnnnnnnnnnnnnnnnnnnnnnnnnnnnnnnnnnnnnnnnnnnnnnnnnnnnnnnnnnnnnnnnnnnnnnnnnnnnnnnnnnnnnnnnnnnnnnnnnnnnnnnnnnnnnnnnnnnnnnnnnnnnnnnnnnnnnnnnnnnnnnnnnnnnnnnnnnnnnnnnnnnnnnnnnnnnnnnnnnnnnnnnnnnnnnnnnnnnnnnnnnnnnnnnnnnnnnnnnnnnnnnnnnnnnnnnnnnnnnnnnnnnnnnnnnnnnnnnnnnnnnnnnnnnnnnnnnnnnnnnnnnnnnnnnnnnnnnnnnnnnnnnnnnnnnnnnnnnnnnnnnnnnnnnnnnnnnnnnnnnnnnnnnnnnnnnnnnnnnnnnnnnnnnnnnnnnnnnnnnnnnnnnnnnnnnnnnnnnnnnnnnnnnnnnnnnnnnnnnnnnnnnnnnnnnnnnnnnnnnnnnnnnnnnnnnnnnnnnnnnnnnnnnnnnnnnnnnnnnnnnnnnnnnnnnnnnnnnnnnnnnnnnnnnnnnnnnnnnnnnnnnnnnnnnnnnnnnnnnnnnnnnnnnnnnnnnnnnnnnnnnnnnnnnnnnnnnnnnnnnnnnnnnnnnnnnnnnnnnnnnnnnnnnnnnnnnnnnnnnnnnnnnnnnnnnnnnnnnnnnnnnnnnnnnnnnnnnnnnnnnnnnnnnnnnnnnnnnnnnnnnnnnnnnnnnnnnnnnnnnnnnnnnnnnnnnnnnnnnnnnnnnnnnnnnnnnnnnnnnnnnnnnnnnnnnnnnnnnnnnnnnnnnnnnnnnnnnnnnnnnnnnnnnnnnnnnnnnnnnnnnnnnnnnnnnnnnnnnnnnnnnnnnnnnnnnnnnnnnnnnnnnnnnnnnnnnnnnnnnnnnnnnnnnnnnnnnnnnnnnnnnnnnnnnnnnnnnnnnnnnnnnnnnnnnnnnnnnnnnnnnnnnnnnnnnnnnnnnnnnnnnnnnnnnnnnnnnnnnnnnnnnnnnnnnnnnnnnnnnnnnnnnnnnnnnnnnnnnnnnnnnnnnnnnnnnnnnnnnnnnnnnnnnnnnnnnnnnnnnnnnnnnnnnnnnnnnnnnnnnnnnnnnnnnnnnnnnnnnnnnnnnnnnnnnnnnnnnnnnnnnnnnnnnnnnnnnnnnnnnnnnnnnnnnnnnnnnnnnnnnnnnnnnnnnnnnnnnnnnnnnnnnnnnnnnnnnnnnnnnnnnnnnnnnnnnnnnnnnnnnnnnnnnnnnnnnnnnnnnnnnnnnnnnnnnnnnnnnnnnnnnnnnnnnnnnnnnnnnnnnnnnnnnnnnnnnnnnnnnnnnnnnnnnnnnnnnnnnnnnnnnnnnnnnnnnnnnnnnnnnnnnnnnnnnnnnnnnnnnnnnnnnnnnnnnnnnnnnnnnnnnnnnnnnnnnnnnnnnnnnnnnnnnnnnnnnnnnnnnnnnnnnnnnnnnnnnnnnnnnnnnnnnnnnnnnnnnnnnnnnnnnnnnnnnnnnnnnnnnnnnnnnnnnnnnnnnnnnnnnnnnnnnnnnnnnnnnnnnnnnnnnnnnnnnnnnnnnnnnnnnnnnnnnnnnnnnnnnnnnnnnnnnnnnnnnnnnnnnnnnnnnnnnnnnnnnnnnnnnnnnnnnnnnnnnnnnnnnnnnnnnnnnnnnnnnnnnnnnnnnnnnnnnnnnnnnnnnnnnnnnnnnnnnnnnnnnnnnnnnnnnnnnnnnnnnnnnnnnnnnnnnnnnnnnnnnnnnnnnnnnnnnnnnnnnnnnnnnnnnnnnnnnnnnnnnnnnnnnnnnnnnnnnnnnnnnnnnnnnnnnnnnnnnnnnnnnnnnnnnnnnnnnnnnnnnnnnnnnnnnnnnnnnnnnnnnnnnnnnnnnnnnnnnnnnnnnnnnnnnnnnnnnnnnnnnnnnnnnnnnnnnnnnnnnnnnnnnnnnnnnnnnnnnnnnnnnnnnnnnnnnnnnnnnnnnnnnnnnnnnnnnnnnnnnnnnnnnnnnnnnnnnnnnnnnnnnnnnnnnnnnnnnnnnnnnnnnnnnnnnnnnnnnnnnnnnnnnnnnnnnnnnnnnnnnnnnnnnnnnnnnnnnnnnnnnnnnnnnnnnnnnnnnnnnnnnnnnnnnnnnnnnnnnnnnnnnnnnnnnnnnnnnnnnnnnnnnnnnnnnnnnnnnnnnnnnnnnnnnnnnnnnnnnnnnnnnnnnnnnnnnnnnnnnnnnnnnnnnnnnnnnnnnnnnnnnnnnnnnnnnnnnnnnnnnnnnnnnnnnnnnnnnnnnnnnnnnnnnnnnnnnnnnnnnnnnnnnnnnnnnnnnnnnnnnnnnnnnnnnnnnnnnnnnnnnnnnnnnnnnnnnnnnnnnnnnnnnnnnnnnnnnnnnnnnnnnnnnnnnnnnnnnnnnnnnnnnnnnnnnnnnnnnnnnnnnnnnnnnnnnnnnnnnnnnnnnnnnnnnnnnnnnnnnnnnnnnnnnnnnnnnnnnnnnnnnnnnnnnnnnnnnnnnnnnnnnnnnnnnnnnnnnnnnnnnnnnnnnnnnnnnnnnnnnnnnnnnnnnnnnnnnnnnnnnnnnnnnnnnnnnnnnnnnnnnnnnnnnnnnnnnnnnnnnnnnnnnnnnnnnnnnnnnnnnnnnnnnnnnnnnnnnnnnnnnnnnnnnnnnnnnnnnnnnnnnnnnnnnnnnnnnnnnnnnnnnnnnnnnnnnnnnnnnnnnnnnnnnnnnnnnnnnnnnnnnnnnnnnnnnnnnnnnnnnnnnnnnnnnnnnnnnnnnnnnnnnnnnnnnnnnnnnnnnnnnnnnnnnnnnnnnnnnnnnnnnnnnnnnnnnnnnnnnnnnnnnnnnnnnnnnnnnnnnnnnnnnnnnnnnnnnnnnnnnnnnnnnnnnnnnnnnnnnnnnnnnnnnnnnnnnnnnnnnnnnagggaaagaatagtactatataggctatttaaaagagatactaaaaggacttattcttaataaaggagaaaggtagttaatctatagtaattattagaatatatgttctttattcgattatttacttactttatactatttatcctatttcatttcatctgataaaagtcatgaaatcatcgagtcagttataagattaatcttatcacaattagcacttacgggacttatactttcccgtttaggattatactattggtcgtttatataggtagttataccttccttctaggggaaatgagaatagggctttgcccctagaggggtataaaagcctatttattatttttatatttatttcttttcttttcctttcttatacttaatatctaattagaaatacacttcttttattaaaaggaatctagtatataatataatattaagtattaccttaaacctaaacttctaaagctatataattatataaataattattataatttatcctagtctagttttaccttatctatcctaaaactaactagaataggattagttatagtcttactataatagattactataattagtaaaggaaaataacctatagtattagattatcttatagaagaagctactaaccctaaaatcctaattcttattaaaatataagacctaattaagagtattaaatataatagccttaaggaaggtcctttaattccttttatttataagattatatatataattcctaataaggaataattccttaaactaactaattagttctaaatagttaaagataataactagataatatataataaaatctaagttttaatcttaaagaatagaaggtctaaggaagctattaaataaattatagaagaatataattaacttatagaaaaatataattaattctatatagagaaagattatcttataatagaatataattaagctaccgaagaatataataaagctactatctatagagatattactatatataagtataataaccttacctattaccttattcttacttaaagtaaaataaactaagtctaaagtaatatactaattataggaattattagttagaagtctataaagatatctaatatactaatattaaaggatagaaaggaagtctattttaaaatataggaaatagttattagatagaagtttaaagtaaataccgactattacctattactagtctactagaaactatatatataaagctaatataaaggtaaagtatagctatatattaccctaagaataaatataatcttaaataacctatatactaatataaaagatattattatctacctctatactatctttataaacctaaattattatatagaagtatatacagcctactataaacttaagataaaacctaaggaagactttaccgacttcttagttaaatttatatagcttatagaagaagccgcggttattaaagaaaattataagcgcgacctatattcgaaacttctgtatctattatagaattaagttatataggctattaattaggaaacggttccttttaatacctttacttagagttactaaagtatgtcctataagattagtctctaataggaagtaaagggcactgtatatatctatataataactatatttagaagtagagttaggactaccgctaactagtctagttttaccccatatataaaatgtaaagggactgccttattatctagactattagctatagagtaagagactcttataaaggagggtcgatacttttactataaggaaaaggggtatataacgttcgagtatctaaagaaaaaggtaaacgtaactataagcgctattactacgactaactagacctatagctaatcgtatataactaaactcgaagaattggaggataatatagacctaggaaaagtaggagcctaggagaagtcttaatcctaggtagaaaacaggtattactatatatactagatctatataagcttttaggaggtctataagatagcttagtatttaatataagactaacttataatagatattcctttacaatcttagcgctagtagatactagagtagacggtttaatatttattaatatagaactggttatactactcggtaagaaatttgggttatatacctataaactagactgtgagtacctagttagaggattcgatagtaaattattataacctattatatatactattattcttatactaagtatagacgattggatctagtagtagattcctatactagtggtagatctaggccaatataatatgattatcggatatatatggtttatagagaataatatcctccttaactaccgatagtattatataatctagctagataagaataccctttttgacgaggtagtaggctagttagctatatctgtacctataacgatccttaagcggtctatataaattaagctagattactagaaggatatagaataacgcgatcgtttctttgaaaaataagccttaagtaatctgcggtaggacctaaagacttagaagctataccctattataagagagtattaatataggtactagtaagttatagagtattgtaagatagaacggaaccttaataacgaaatcgaactagtatctctttaaatagagatactagaggaagaaataaaggaagttctcctaccaatagatattagtattatcggttaggtaggatttaaccgtttataaatataaatggttattaataaagatatcgaagtcttttagaccttactctgtgaaattaatcggattatagatattaaatctacgattataaaggatatagaactcgataagattaaacgaaccctcctataggagtattacaatcttacagaagtattctctaagaagaaatctaataaactactactatattgcctaggggtagactataatattatcctcgaagtagaagtatagctaggatactacttgctctataaattattattagataaactaaaaactgtaaaatagtatatcctcgataatcttaagaaaggatttattattcctagtttagctctatatactttactaatcttaatagcgaagaagctaggtagtagtctatatttctacgtagacttctgaagattaaatataattataaggaaagattattacccgttacctcttatcgataaagtactctaacgaatgagtaaagtaaaattctttataaagctcgatatctactaaggtttctactatattaggttaatactagctatagaagatcttataatattctatacctaatatagattgtttaagtataaagtaactctgtttagccttacgaatagtcctataacattctagcgatttataaatatagtactcggagactatatagataactatacaattgtatttatagataatattataatctatagtaagatatttaaagaatataagaagtatattagagaagtcctcaaataactataaagagtaggattataggttatactatctaagtgtaaattctctatatagaaaactaagttcttaggatttattataagtaccgacggtattacggtagatctagagaagattacagttattaggaactggaagatactattaataattaagggaatacagtctttcttaggattctgtaacttctattaataatttattaaagattatagtttcctttcgaaactattatattatcttatatagtataatatagtatataaatggtcgctggactgtaagtaagtatttatataattaaagtataagttaataactgtacctatcctacggtattacaatcccgacctctagacttatatagaaacggatgcctcgaatagagttattagtgctatcctcttataatatcataaggctaacgatttttagtattctattaccttcttcttaaagactatataacctatagagcttaattataaaatcagggataaggaactccttacgattatttgtatactctaagaatagcgactagaacttaaagggctctcttatatagaatgtttcgagatccttatagattattagtctctcgaatattttataatagtataatagataaattaacgataagtatagtagagtaagttcctcttatagttctactttataattaaatactatcctaggaaatggaatattatcacagatattcttttaaggaaggaaagcccttatatagatatcagtcgataccttatattactccctaaggaatattttagagaagaaataaaattgatactagaaatcgagatatccctattatagacggaatctatataggatacagaggccctccctctaccggttaagactatatagaacttagatataaccgaacgagtttagttagcgaaccgctagagccctaagttagaagtattccgttagactgtaagataggaaacggatccctattaggtagtgtaagacggattactactatttaaagactatcttaaagtccctaatgaaggggatctttgagtatagttactcgataagatatactaataactgttaactatataccctagaattgagaaacttaagaagcttattatagtaagatactattagttaggataggttatagatataaagtagtatatagataactatttagtatataaatatataaagacttagagagattatatacctagtctcctatacctattaccgattcttaaataactataatagtatttatcgatagatttctgttcctttctaaaggatagatacagctatgatatagtatttattattattaattaactaagtaagagaccgatattaattccctattataaagatactaatataaagtagatagtgtatctatttatagataatattatatagattataggaatccccgaaactattatatcggactaaaggggatagtttatctctaagttttagatagagttctatagaatcctagggattaagcggaaactatctactatatactacctacagatagacggctagagtaaaattataaattagtttatagtatagcgattaagactgtatattaaatataactaggataactagttagaatacctactaatagtagattttatagtattaattcttccgtaggatataataaagaggtcccctttctttgttaaatagggttataaaccagcaatatcttttaattagaactatataagactaatatataataaataagaagcggtagatcgactcttaaagttataatagatctaggaagatatatataaatagattataaagtcataggaactataggtataataggctaaccgttatcgttataaagaggactttagtattagcgacctagtttttattactataaaggattggctataggactatctaagttgaaaactctcctatactactagtagaccctataagattatcgaaaaggttaggaatatatataagttagacctactatagttaattaatatctacccagtgtttaacctaagtaagctgcggaaggtagcgagtatagaaccacttataggataatatatagatccgctacctccgatatagatagggtagactaataagtaggaagttaaaaagatcctagatataagaaagtattataggaagctgcagtactgtatatagtggttaggatataacctagatcccgtatagtacctagtaggtaactttaagaatgctccggagatgattaaggaattctataatacctatctagcgaagcctaggccgccgatacgcctataagaatagattgaggccgcgtaagataatcggatattagacaaccatgtggataacgagaagctagtatttagggactaaatgtattcttacctaggggttatattacaattagcacttataggactcgtactttcccgtttaggattatactgttggtcgtttgcgcaggcagtcgtaccttccttctaggggaaacgagaatagggctttgtccctaaaggggtataa

SEQ ID NO: 29 - DNA, 10213 bp, Penicillium roqueforti
  misc_feature (1520)..(7152): n is a, c, g, or t
ctataggcctagggtattagcctataatttagtataggctgaagaagtcagcctaaagcccagcccattagtaggctaggctgggctaggctataggccgggtaggctttgccgatgtctagtagtaagtagactgaaataacagaaaataccaccggcatcgcaatatatctagatagatatctcttagagtactcctactccgaatcaagatccatttctttaatccaggctacaaaatacaaaggaaacggcggttcctagtccctagtcctaaataaataaatgttcgagtgctaggaagagatattcaaaaaaatggtgccgcctagtccaataaagggccctattatcgcagcagcgtttcgtttcctaccgctcgtgcttaattcttggtccttcctatcgaagactggctagagctcctatcctggttacttaaatgtaaaggtatacgttatgcaggtgtacggcctgtcaaccgggtaagatacaaagggctttgtggagggaacacaatgtattgatggtatgccaagactaattcttgccagtctcggaggggcccctggggggtcctaaactataaggaaatctatctgcctatgttcatgtgacgaacccctcacggatcgacatcgaaacagatgtatgatgacatagatattccttcccgagcctgtgcaggtttacatatgtttccctcttgtacggacctttatccgttacattaaaggtgctttatcttattatatttatacgcctttaagtacaaataccactgtattaagatacatcgcaaaccaagatttagatatccaattcgactgtaaccagctaagcccaaatactgaactagggcgatctctaccggagtaacgtcttaataacctactctgaaccttatcatattcttacaatcgtcgattagaggcagttagactagctacctgtatactaggaggccagaaagaagcagtatactgctaataggaataacgaatggtctaaaaaatatataccaatgattttgtgttaataatagtacttaggatccgtaggactactacacgatagctataggatattaagataaaggcagcgttttattgctccagcttttattaatctcttttctatattacgtaaaataataacagagtcgaaacataaatagcaaataactacagaaagcgcgcgaacgaaagcaggagggcaagaaatccccccagcgaatatctctacattcaataacaggatagaatcctagggccgctaagatcatagtagctttagagcattttagaccacagagatagcgctactagcaataaggcccttttcacgtcttttaccctaccttaccatatagtactatcgcagtttaatgcactagtaaacaaaatggactatcgataccttatagagagattaccggtagtagaaaacaactagtattgtcagaatctaggatgaatactgtcatttttcatccctgatacagttggatcacgtgactnnnnnnnnnnnnnnnnnnnnnnnnnnnnnnnnnnnnnnnnnnnnnnnnnnnnnnnnnnnnnnnnnnnnnnnnnnnnnnnnnnnnnnnnnnnnnnnnnnnnnnnnnnnnnnnnnnnnnnnnnnnnnnnnnnnnnnnnnnnnnnnnnnnnnnnnnnnnnnnnnnnnnnnnnnnnnnnnnnnnnnnnnnnnnnnnnnnnnnnnnnnnnnnnnnnnnnnnnnnnnnnnnnnnnnnnnnnnnnnnnnnnnnnnnnnnnnnnnnnnnnnnnnnnnnnnnnnnnnnnnnnnnnnnnnnnnnnnnnnnnnnnnnnnnnnnnnnnnnnnnnnnnnnnnnnnnnnnnnnnnnnnnnnnnnnnnnnnnnnnnnnnnnnnnnnnnnnnnnnnnnnnnnnnnnnnnnnnnnnnnnnnnnnnnnnnnnnnnnnnnnnnnnnnnnnnnnnnnnnnnnnnnnnnnnnnnnnnnnnnnnnnnnnnnnnnnnnnnnnnnnnnnnnnnnnnnnnnnnnnnnnnnnnnnnnnnnnnnnnnnnnnnnnnnnnnnnnnnnnnnnnnnnnnnnnnnnnnnnnnnnnnnnnnnnnnnnnnnnnnnnnnnnnnnnnnnnnnnnnnnnnnnnnnnnnnnnnnnnnnnnnnnnnnnnnnnnnnnnnnnnnnnnnnnnnnnnnnnnnnnnnnnnnnnnnnnnnnnnnnnnnnnnnnnnnnnnnnnnnnnnnnnnnnnnnnnnnnnnnnnnnnnnnnnnnnnnnnnnnnnnnnnnnnnnnnnnnnnnnnnnnnnnnnnnnnnnnnnnnnnnnnnnnnnnnnnnnnnnnnnnnnnnnnnnnnnnnnnnnnnnnnnnnnnnnnnnnnnnnnnnnnnnnnnnnnnnnnnnnnnnnnnnnnnnnnnnnnnnnnnnnnnnnnnnnnnnnnnnnnnnnnnnnnnnnnnnnnnnnnnnnnnnnnnnnnnnnnnnnnnnnnnnnnnnnnnnnnnnnnnnnnnnnnnnnnnnnnnnnnnnnnnnnnnnnnnnnnnnnnnnnnnnnnnnnnnnnnnnnnnnnnnnnnnnnnnnnnnnnnnnnnnnnnnnnnnnnnnnnnnnnnnnnnnnnnnnnnnnnnnnnnnnnnnnnnnnnnnnnnnnnnnnnnnnnnnnnnnnnnnnnnnnnnnnnnnnnnnnnnnnnnnnnnnnnnnnnnnnnnnnnnnnnnnnnnnnnnnnnnnnnnnnnnnnnnnnnnnnnnnnnnnnnnnnnnnnnnnnnnnnnnnnnnnnnnnnnnnnnnnnnnnnnnnnnnnnnnnnnnnnnnnnnnnnnnnnnnnnnnnnnnnnnnnnnnnnnnnnnnnnnnnnnnnnnnnnnnnnnnnnnnnnnnnnnnnnnnnnnnnnnnnnnnnnnnnnnnnnnnnnnnnnnnnnnnnnnnnnnnnnnnnnnnnnnnnnnnnnnnnnnnnnnnnnnnnnnnnnnnnnnnnnnnnnnnnnnnnnnnnnnnnnnnnnnnnnnnnnnnnnnnnnnnnnnnnnnnnnnnnnnnnnnnnnnnnnnnnnnnnnnnnnnnnnnnnnnnnnnnnnnnnnnnnnnnnnnnnnnnnnnnnnnnnnnnnnnnnnnnnnnnnnnnnnnnnnnnnnnnnnnnnnnnnnnnnnnnnnnnnnnnnnnnnnnnnnnnnnnnnnnnnnnnnnnnnnnnnnnnnnnnnnnnnnnnnnnnnnnnnnnnnnnnnnnnnnnnnnnnnnnnnnnnnnnnnnnnnnnnnnnnnnnnnnnnnnnnnnnnnnnnnnnnnnnnnnnnnnnnnnnnnnnnnnnnnnnnnnnnnnnnnnnnnnnnnnnnnnnnnnnnnnnnnnnnnnnnnnnnnnnnnnnnnnnnnnnnnnnnnnnnnnnnnnnnnnnnnnnnnnnnnnnnnnnnnnnnnnnnnnnnnnnnnnnnnnnnnnnnnnnnnnnnnnnnnnnnnnnnnnnnnnnnnnnnnnnnnnnnnnnnnnnnnnnnnnnnnnnnnnnnnnnnnnnnnnnnnnnnnnnnnnnnnnnnnnnnnnnnnnnnnnnnnnnnnnnnnnnnnnnnnnnnnnnnnnnnnnnnnnnnnnnnnnnnnnnnnnnnnnnnnnnnnnnnnnnnnnnnnnnnnnnnnnnnnnnnnnnnnnnnnnnnnnnnnnnnnnnnnnnnnnnnnnnnnnnnnnnnnnnnnnnnnnnnnnnnnnnnnnnnnnnnnnnnnnnnnnnnnnnnnnnnnnnnnnnnnnnnnnnnnnnnnnnnnnnnnnnnnnnnnnnnnnnnnnnnnnnnnnnnnnnnnnnnnnnnnnnnnnnnnnnnnnnnnnnnnnnnnnnnnnnnnnnnnnnnnnnnnnnnnnnnnnnnnnnnnnnnnnnnnnnnnnnnnnnnnnnnnnnnnnnnnnnnnnnnnnnnnnnnnnnnnnnnnnnnnnnnnnnnnnnnnnnnnnnnnnnnnnnnnnnnnnnnnnnnnnnnnnnnnnnnnnnnnnnnnnnnnnnnnnnnnnnnnnnnnnnnnnnnnnnnnnnnnnnnnnnnnnnnnnnnnnnnnnnnnnnnnnnnnnnnnnnnnnnnnnnnnnnnnnnnnnnnnnnnnnnnnnnnnnnnnnnnnnnnnnnnnnnnnnnnnnnnnnnnnnnnnnnnnnnnnnnnnnnnnnnnnnnnnnnnnnnnnnnnnnnnnnnnnnnnnnnnnnnnnnnnnnnnnnnnnnnnnnnnnnnnnnnnnnnnnnnnnnnnnnnnnnnnnnnnnnnnnnnnnnnnnnnnnnnnnnnnnnnnnnnnnnnnnnnnnnnnnnnnnnnnnnnnnnnnnnnnnnnnnnnnnnnnnnnnnnnnnnnnnnnnnnnnnnnnnnnnnnnnnnnnnnnnnnnnnnnnnnnnnnnnnnnnnnnnnnnnnnnnnnnnnnnnnnnnnnnnnnnnnnnnnnnnnnnnnnnnnnnnnnnnnnnnnnnnnnnnnnnnnnnnnnnnnnnnnnnnnnnnnnnnnnnnnnnnnnnnnnnnnnnnnnnnnnnnnnnnnnnnnnnnnnnnnnnnnnnnnnnnnnnnnnnnnnnnnnnnnnnnnnnnnnnnnnnnnnnnnnnnnnnnnnnnnnnnnnnnnnnnnnnnnnnnnnnnnnnnnnnnnnnnnnnnnnnnnnnnnnnnnnnnnnnnnnnnnnnnnnnnnnnnnnnnnnnnnnnnnnnnnnnnnnnnnnnnnnnnnnnnnnnnnnnnnnnnnnnnnnnnnnnnnnnnnnnnnnnnnnnnnnnnnnnnnnnnnnnnnnnnnnnnnnnnnnnnnnnnnnnnnnnnnnnnnnnnnnnnnnnnnnnnnnnnnnnnnnnnnnnnnnnnnnnnnnnnnnnnnnnnnnnnnnnnnnnnnnnnnnnnnnnnnnnnnnnnnnnnnnnnnnnnnnnnnnnnnnnnnnnnnnnnnnnnnnnnnnnnnnnnnnnnnnnnnnnnnnnnnnnnnnnnnnnnnnnnnnnnnnnnnnnnnnnnnnnnnnnnnnnnnnnnnnnnnnnnnnnnnnnnnnnnnnnnnnnnnnnnnnnnnnnnnnnnnnnnnnnnnnnnnnnnnnnnnnnnnnnnnnnnnnnnnnnnnnnnnnnnnnnnnnnnnnnnnnnnnnnnnnnnnnnnnnnnnnnnnnnnnnnnnnnnnnnnnnnnnnnnnnnnnnnnnnnnnnnnnnnnnnnnnnnnnnnnnnnnnnnnnnnnnnnnnnnnnnnnnnnnnnnnnnnnnnnnnnnnnnnnnnnnnnnnnnnnnnnnnnnnnnnnnnnnnnnnnnnnnnnnnnnnnnnnnnnnnnnnnnnnnnnnnnnnnnnnnnnnnnnnnnnnnnnnnnnnnnnnnnnnnnnnnnnnnnnnnnnnnnnnnnnnnnnnnnnnnnnnnnnnnnnnnnnnnnnnnnnnnnnnnnnnnnnnnnnnnnnnnnnnnnnnnnnnnnnnnnnnnnnnnnnnnnnnnnnnnnnnnnnnnnnnnnnnnnnnnnnnnnnnnnnnnnnnnnnnnnnnnnnnnnnnnnnnnnnnnnnnnnnnnnnnnnnnnnnnnnnnnnnnnnnnnnnnnnnnnnnnnnnnnnnnnnnnnnnnnnnnnnnnnnnnnnnnnnnnnnnnnnnnnnnnnnnnnnnnnnnnnnnnnnnnnnnnnnnnnnnnnnnnnnnnnnnnnnnnnnnnnnnnnnnnnnnnnnnnnnnnnnnnnnnnnnnnnnnnnnnnnnnnnnnnnnnnnnnnnnnnnnnnnnnnnnnnnnnnnnnnnnnnnnnnnnnnnnnnnnnnnnnnnnnnnnnnnnnnnnnnnnnnnnnnnnnnnnnnnnnnnnnnnnnnnnnnnnnnnnnnnnnnnnnnnnnnnnnnnnnnnnnnnnnnnnnnnnnnnnnnnnnnnnnnnnnnnnnnnnnnnnnnnnnnnnnnnnnnnnnnnnnnnnnnnnnnnnnnnnnnnnnnnnnnnnnnnnnnnnnnnnnnnnnnnnnnnnnnnnnnnnnnnnnnnnnnnnnnnnnnnnnnnnnnnnnnnnnnnnnnnnnnnnnnnnnnnnnnnnnnnnnnnnnnnnnnnnnnnnnnnnnnnnnnnnnnnnnnnnnnnnnnnnnnnnnnnnnnnnnnnnnnnnnnnnnnnnnnnnnnnnnnnnnnnnnnnnnnnnnnnnnnnnnnnnnnnnnnnnnnnnnnnnnnnnnnnnnnnnnnnnnnnnnnnnnnnnnnnnnnnnnnnnnnnnnnnnnnnnnnnnnnnnnnnnnnnnnnnnnnnnnnnnnnnnnnnnnnnnnnnnnnnnnnnnnnnnnnnnnnnnnnnnnnnnnnnnnnnnnnnnnnnnnnnnnnnnnnnnnnnnnnnnnnnnnnnnnnnnnnnnnnnnnnnnnnnnnnnnnnnnnnnnnnnnnnnnnnnnnnnnnnnnnnnnnnnnnnnnnnnnnnnnnnnnnnnnnnnnnnnnnnnnnnnnnnnnnnnnnnnnnnnnnnnnnnnnnnnnnnnnnnnnnnnnnnnnnnnnnnnnnnnnnnnnnnnnnnnnnnnnnnnnnnnnnnnnnnnnnnnnnnnnnnnnnnnnnnnnnnnnnnnnnnnnnnnnnnnnnnnnnnnnnnnnnnnnnnnnnnnnnnnnnnnnnnnnnnnnnnnnnnnnnnnnnnnnnnnnnnnnnnnnnnnnnnnnnnnnnnnnnnnnnnnnnnnnnnnnnnnnnnnnnnnnnnnnnnnnnnnnnnnnnnnnnnnnnnnnnnnnnnnnnnnnnnnnnnnnnnnnnnnnnnnnnnnnnnnnnnnnnnnnnnnnnnnnnnnnnnnnnnnnnnnnnnnnnnnnnnnnnnnnnnnnnnnnnnnnnnnnnnnnnnnnnnnnnnnnnnnnnnnnnnnnnnnnnnnnnnnnnnnnnnnnnnnnnnnnnnnnnnnnnnnnnnnnnnnnnnnnnnnnnnnnnnnnnnnnnnnnnnnnnnnnnnnnnnnnnnnnnnnnnnnnnnnnnnnnnnnnnnnnnnnnnnnnnnnnnnnnnnnnnnnnnnnnnnnnnnnnnnnnnnnnnnnnnnnnnnnnnnnnnnnnnnnnnnnnnnnnnnnnnnnnnnnnnnnnnnnnnnnnnnnnnnnnnnnnnnnnnnnnnnnnnnnnnnnnnnnnnnnnnnnnnnnnnnnnnnnnnnnnnnnnnnnnnnnnnnnnnnnnnnnnnnnnnnnnnnnnnnnnnnnnnnnnnnnnnnnnnnnnnnnnnnnnnnnnnnnnnnnnnnnnnnnnnnnnnnnnnnnnnnnnnnnnnnnnnnnnnnnnnnnnnnnnnnnnnnnnnnnnnnnnnnnnnnnnnnnnnnnttgttttgtttgttttgattactaagttgtccatcagattgtcatgttttaggactattgtcagttttagagagttagagaatttattaagatttttctgccacaaaatacactcgccttaccaccgtttttccgtcaagtatcaataaactaatagtaatactaaaatcaataatctattacttgtggctatttattatacttattccttcctatcctattaacccatatattagattaggatatcacgttaggctagagaatagggatatactagagtggggacatactagttagagcgaaggggaagtagaaaagaaaaagcagtataaactggagggtaataatagattgttagcctatccaaagttagcctaagcgtatctttatctactgcgatattgagcacttttagataggttgaaatcgtctaaacaaaagatacattctactagtaaaaaaaatgacgtaacaatcttctttaagcttaataaatcgttctatataacgatctttttaaaaaaataggttgaattattgagctctattacagtaacatccttccttaaacccagaaaacatatatcgatatcacaaccttccgtagacttagtatagcaacttagagctataaagcaaattagtgactaagatattattctagtcaaggtacataccattgtaaattggacctacagacatagtcttatatatacgaatattattatacctagggaataaagggagaatacaattaacccaattaatgccacccagagagctttatagtacttaggagccctagggcctagatatcgctaaaataaattaaacgtagtggttactacagatataggctttatatatataaactaagattaaatgaattgcgtataaataaagccttaactagctagaattataaatataaataatataagcaaaatattgcgatactactgaaatagtctattaataagaaatatcttatatagcgataaatttaaacttaccgactgataaatggttaaagacaaaacgaccattatactaacaaaaaataagctagcaatcatataagttaaatgtaactgcaaagttaatatacacagatactataaaagagtatcagtattaccctcattcttacttactatacttacctcatttaaaacgagtaaaagtaaaataaagccgatttctataggagacgtcgaacgtagcagatctagtattaggttaggacaattttatatagctgaacaaattgatctacgtactattatcagagtccgtcgttttaaatacaagtaccatagacgcaattgagctaagaataataataccgcctattataatctagctataaataagttaactcttgctccactctgtctagcttaaagccttagtatataggagccagaatataagacttaagctagagtaaagcattgctattgttaatataaccagttagaatattcggtctagctctattcttttaatatcaagtttataaagatttttagctatagtctatagtaccagctattatttaaataaagatagtagtaggcttacttagtatagagttttgatagtaaagtttaagaaatatcgcttaatagatacaaaggttatctattactaatatattaaaagatagaagaggtaagaagtaaatcctattaaaaaattgagggtaatacacttataagagagtatagataataacctgctaataataactccgccgacaatcatcccaaccaggtatagcgactttggtagctataaattagctcttaagaaagtaaatcaggatataactcattatccgataactcttaagaagataccacttatcattttctactcagacaaggtaacattaatatacgagatatagtataatctaacttaacgcgatattaaacattcaccgatagagataggaaatacctagagatcccttaggtcttcgttcgagaccctagtaaccggctaaatagaagaatctaaaaggttatactagtccgcttcggtctagatcaagtcgctagcaacctttataattaaatcagtggataagataatcaacccttgactgttttagagcccacgacctatatacatcgatatcgtcgtagaaaagctagtaaagttggattttaatagagcctatctaggctacttataactaccctaaagtctctaagtaatttggtcatataatagaaacattgaacaattaaaagaatacactaataaactacctagtaaagaggattagagcatattagaggcacagatagccacaaagaaataatatacttcttcgttcttctcttagttatagtattacatatctaaataataaagtattagttaaaaccattataacgttaaatatttgatattaggactagttacaaaaataacagcttttgaaggttacgtaaccttaggaaagtacccctagtctgcttcaaaggtaacgttaggtatatttagaaaaatgatattaaaactatttctcgtacttttaccaatctaagcgaccgtgattcctccttaccgctcttatcctttaagagaatcaatgctaatcctacattagcatcgcttatctcaaggattggtagttgatatataaaatcctacaggacagcaatcctttcattttcatattgcctaacaatgttctgtcatttagtgagatctagagaccttcaatggtctcccactcttagtacccgatgggttttccatggtagggcaattactagatcacatgctgtcctacttaagcccctctcctaaaacttaggattgataggtattaaattctcacctagcgcactagaaactattcctaaaagtggccttgattcatcagcctttagcggaaatcagcaatatttcgattcttcgtcgcccttttccttacctgcgtcgtcgtttaaaccgaaattaggctatacacagcagtcctccgtacacctgaataagtggtaaatatagagaaatgctaccgacacgcgaaaattgctaccgt

SEQ ID NO: 30 - DNA, 9539 bp, Penicillium roqueforti
  misc_feature (2691)..(6780): n is a, c, g, or t
tttatatattagtacttctcttttagtagttattatacctttagtatagcttatatttagttctttcttaatataagagttataagttatagtagtagcttatatacttctactttatatactagagcttataatagtataggtttagtttatagtcttcttttcttattataaattaatcttatatactatactctagtaggtctagataaatatattaaagttaacctagttctaatttactacctatataatttataactataggagatagggtagttttagatatagattatacttatagttctctttaataatagctacttcctctataaactatataaattctataagaaagtcggtaaagttattataaggttttattattagcttatagtaactagtataagcttctaccttcctatttagatttataaagatagtttatagatatataataatatccttagtattaaggtataggttacttaaggctatacttatttatagtataatatagagttaggcctttcttttatagtaattctaaatatagatcttttagtagatagagagagagtaatagttagtattagccttaagtttctattaaataattatttcctaagttttaaattatacctccttcctatccttaaagataggtatattaggtatcttaatagtttttctaactcctataattagtatactagagtataagggagttccttaagttataggtttattatttaagagatagtaggtataatagtctctttcttatagtataaggtttaggtaggtaattaccttattatatttaagagttaagttctagattaaggttattatccctacttccttaatatagagagtagtaatttctataattagttttcggttttcttttatagtatccttatattaactagtaagggttataaactattcttcttttagggttccttaaagtatattatatattaaattttcttctttaaggtttattatcttattatatttaatactttctattataatagggtttaaggttaaggcgctaggaattaggatagttaggtctagctagttaagatcctctttatataaggctttaagaggtcgctttctatagtttactaagcttcttattaagggagctatatttataattaaaaggaaaaattttaaaaggttagactaagctagaactagttataataactgtttatatagctatatagtctaaaggttaagttaggttagtacttagaattatattataagctaattcgatttagaagaaaagagtataattctaatcaaattctaagtataaagaagaaaaggaaaaaagagaaactatctaagtatacgttcttcccttcttatacccttacgtttatctcacttaattctcatttatcttcttaggaaggtataaggacatagtcattcctacctcgtttggtaagtacgaagatatgaccacccctgccctgtttagcaagtataatcctcctcagatcgtcacactatccctagaataaataaggatagagtactagtatcctttctctttactaacttaatagactactctagaatagatattactataggatacttataaagcgccttggtatactatataataaatgtagatataggagaagactactcctattatacttaacatagaacctatattagtaatactaacttaagtttaaggacccctagttaggagattaaaaaggagtaatattggtatcctattagagagatattaggatcctaagtaaaaactcctaaatattaaatataagaagtaaaaaagagatactaagtatatagaaaaatataaaccttcttaagaaggaaatgtaaagaaactttctctagataactctaattaggtaaatattaatataccttttgttgaccagaaatgacatacttctatatattccttatatctagtagtatattagtagttagcagctatatatagtaattatataaatatatactaagatagatcttagaggagaaccctccttttcacaattatacttattttaccctttggtctagtatcctactacttatactatataaaacagcctctcttttattcaataccttttatctataatagaaaacctctttataataaggatatcgacctactattaagttttaaataagtataaaaatcactattctagaataaatagaaggaagctatagaaaaatagcttaataaccttactataaagagaatatagatactaatcctaaagctactaaaggtaaaagtccttctaggataatagtattttactattaaaataaatataagagataaagtctatagctttaaggtaagataggttatctatagtaatttctaggagaaaagcgataacttaagtgagtcttatatactagttatatcggaaataataattaaaattatcctaacgcttattatagtctatagccttaaataatactaagtagattttatagtagcttaccttaatatatctagagaagatatagagatagtatatataagataactaataggttttaagtttatagatatagaaggaaatttaaagtaataggtatatatacttaactaggctctttttagtctataagactctgccttccttnnnnnnnnnnnnnnnnnnnnnnnnnnnnnnnnnnnnnnnnnnnnnnnnnnnnnnnnnnnnnnnnnnnnnnnnnnnnnnnnnnnnnnnnnnnnnnnnnnnnnnnnnnnnnnnnnnnnnnnnnnnnnnnnnnnnnnnnnnnnnnnnnnnnnnnnnnnnnnnnnnnnnnnnnnnnnnnnnnnnnnnnnnnnnnnnnnnnnnnnnnnnnnnnnnnnnnnnnnnnnnnnnnnnnnnnnnnnnnnnnnnnnnnnnnnnnnnnnnnnnnnnnnnnnnnnnnnnnnnnnnnnnnnnnnnnnnnnnnnnnnnnnnnnnnnnnnnnnnnnnnnnnnnnnnnnnnnnnnnnnnnnnnnnnnnnnnnnnnnnnnnnnnnnnnnnnnnnnnnnnnnnnnnnnnnnnnnnnnnnnnnnnnnnnnnnnnnnnnnnnnnnnnnnnnnnnnnnnnnnnnnnnnnnnnnnnnnnnnnnnnnnnnnnnnnnnnnnnnnnnnnnnnnnnnnnnnnnnnnnnnnnnnnnnnnnnnnnnnnnnnnnnnnnnnnnnnnnnnnnnnnnnnnnnnnnnnnnnnnnnnnnnnnnnnnnnnnnnnnnnnnnnnnnnnnnnnnnnnnnnnnnnnnnnnnnnnnnnnnnnnnnnnnnnnnnnnnnnnnnnnnnnnnnnnnnnnnnnnnnnnnnnnnnnnnnnnnnnnnnnnnnnnnnnnnnnnnnnnnnnnnnnnnnnnnnnnnnnnnnnnnnnnnnnnnnnnnnnnnnnnnnnnnnnnnnnnnnnnnnnnnnnnnnnnnnnnnnnnnnnnnnnnnnnnnnnnnnnnnnnnnnnnnnnnnnnnnnnnnnnnnnnnnnnnnnnnnnnnnnnnnnnnnnnnnnnnnnnnnnnnnnnnnnnnnnnnnnnnnnnnnnnnnnnnnnnnnnnnnnnnnnnnnnnnnnnnnnnnnnnnnnnnnnnnnnnnnnnnnnnnnnnnnnnnnnnnnnnnnnnnnnnnnnnnnnnnnnnnnnnnnnnnnnnnnnnnnnnnnnnnnnnnnnnnnnnnnnnnnnnnnnnnnnnnnnnnnnnnnnnnnnnnnnnnnnnnnnnnnnnnnnnnnnnnnnnnnnnnnnnnnnnnnnnnnnnnnnnnnnnnnnnnnnnnnnnnnnnnnnnnnnnnnnnnnnnnnnnnnnnnnnnnnnnnnnnnnnnnnnnnnnnnnnnnnnnnnnnnnnnnnnnnnnnnnnnnnnnnnnnnnnnnnnnnnnnnnnnnnnnnnnnnnnnnnnnnnnnnnnnnnnnnnnnnnnnnnnnnnnnnnnnnnnnnnnnnnnnnnnnnnnnnnnnnnnnnnnnnnnnnnnnnnnnnnnnnnnnnnnnnnnnnnnnnnnnnnnnnnnnnnnnnnnnnnnnnnnnnnnnnnnnnnnnnnnnnnnnnnnnnnnnnnnnnnnnnnnnnnnnnnnnnnnnnnnnnnnnnnnnnnnnnnnnnnnnnnnnnnnnnnnnnnnnnnnnnnnnnnnnnnnnnnnnnnnnnnnnnnnnnnnnnnnnnnnnnnnnnnnnnnnnnnnnnnnnnnnnnnnnnnnnnnnnnnnnnnnnnnnnnnnnnnnnnnnnnnnnnnnnnnnnnnnnnnnnnnnnnnnnnnnnnnnnnnnnnnnnnnnnnnnnnnnnnnnnnnnnnnnnnnnnnnnnnnnnnnnnnnnnnnnnnnnnnnnnnnnnnnnnnnnnnnnnnnnnnnnnnnnnnnnnnnnnnnnnnnnnnnnnnnnnnnnnnnnnnnnnnnnnnnnnnnnnnnnnnnnnnnnnnnnnnnnnnnnnnnnnnnnnnnnnnnnnnnnnnnnnnnnnnnnnnnnnnnnnnnnnnnnnnnnnnnnnnnnnnnnnnnnnnnnnnnnnnnnnnnnnnnnnnnnnnnnnnnnnnnnnnnnnnnnnnnnnnnnnnnnnnnnnnnnnnnnnnnnnnnnnnnnnnnnnnnnnnnnnnnnnnnnnnnnnnnnnnnnnnnnnnnnnnnnnnnnnnnnnnnnnnnnnnnnnnnnnnnnnnnnnnnnnnnnnnnnnnnnnnnnnnnnnnnnnnnnnnnnnnnnnnnnnnnnnnnnnnnnnnnnnnnnnnnnnnnnnnnnnnnnnnnnnnnnnnnnnnnnnnnnnnnnnnnnnnnnnnnnnnnnnnnnnnnnnnnnnnnnnnnnnnnnnnnnnnnnnnnnnnnnnnnnnnnnnnnnnnnnnnnnnnnnnnnnnnnnnnnnnnnnnnnnnnnnnnnnnnnnnnnnnnnnnnnnnnnnnnnnnnnnnnnnnnnnnnnnnnnnnnnnnnnnnnnnnnnnnnnnnnnnnnnnnnnnnnnnnnnnnnnnnnnnnnnnnnnnnnnnnnnnnnnnnnnnnnnnnnnnnnnnnnnnnnnnnnnnnnnnnnnnnnnnnnnnnnnnnnnnnnnnnnnnnnnnnnnnnnnnnnnnnnnnnnnnnnnnnnnnnnnnnnnnnnnnnnnnnnnnnnnnnnnnnnnnnnnnnnnnnnnnnnnnnnnnnnnnnnnnnnnnnnnnnnnnnnnnnnnnnnnnnnnnnnnnnnnnnnnnnnnnnnnnnnnnnnnnnnnnnnnnnnnnnnnnnnnnnnnnnnnnnnnnnnnnnnnnnnnnnnnnnnnnnnnnnnnnnnnnnnnnnnnnnnnnnnnnnnnnnnnnnnnnnnnnnnnnnnnnnnnnnnnnnnnnnnnnnnnnnnnnnnnnnnnnnnnnnnnnnnnnnnnnnnnnnnnnnnnnnnnnnnnnnnnnnnnnnnnnnnnnnnnnnnnnnnnnnnnnnnnnnnnnnnnnnnnnnnnnnnnnnnnnnnnnnnnnnnnnnnnnnnnnnnnnnnnnnnnnnnnnnnnnnnnnnnnnnnnnnnnnnnnnnnnnnnnnnnnnnnnnnnnnnnnnnnnnnnnnnnnnnnnnnnnnnnnnnnnnnnnnnnnnnnnnnnnnnnnnnnnnnnnnnnnnnnnnnnnnnnnnnnnnnnnnnnnnnnnnnnnnnnnnnnnnnnnnnnnnnnnnnnnnnnnnnnnnnnnnnnnnnnnnnnnnnnnnnnnnnnnnnnnnnnnnnnnnnnnnnnnnnnnnnnnnnnnnnnnnnnnnnnnnnnnnnnnnnnnnnnnnnnnnnnnnnnnnnnnnnnnnnnnnnnnnnnnnnnnnnnnnnnnnnnnnnnnnnnnnnnnnnnnnnnnnnnnnnnnnnnnnnnnnnnnnnnnnnnnnnnnnnnnnnnnnnnnnnnnnnnnnnnnnnnnnnnnnnnnnnnnnnnnnnnnnnnnnnnnnnnnnnnnnnnnnnnnnnnnnnnnnnnnnnnnnnnnnnnnnnnnnnnnnnnnnnnnnnnnnnnnnnnnnnnnnnnnnnnnnnnnnnnnnnnnnnnnnnnnnnnnnnnnnnnnnnnnnnnnnnnnnnnnnnnnnnnnnnnnnnnnnnnnnnnnnnnnnnnnnnnnnnnnnnnnnnnnnnnnnnnnnnnnnnnnnnnnnnnnnnnnnnnnnnnnnnnnnnnnnnnnnnnnnnnnnnnnnnnnnnnnnnnnnnnnnnnnnnnnnnnnnnnnnnnnnnnnnnnnnnnnnnnnnnnnnnnnnnnnnnnnnnnnnnnnnnnnnnnnnnnnnnnnnnnnnnnnnnnnnnnnnnnnnnnnnnnnnnnnnnnnnnnnnnnnnnnnnnnnnnnnnnnnnnnnnnnnnnnnnnnnnnnnnnnnnnnnnnnnnnnnnnnnnnnnnnnnnnnnnnnnnnnnnnnnnnnnnnnnnnnnnnnnnnnnnnnnnnnnnnnnnnnnnnnnnnnnnnnnnnnnnnnnnnnnnnnnnnnnnnnnnnnnnnnnnnnnnnnnnnnnnnnnnnnnnnnnnnnnnnnnnnnnnnnnnnnnnnnnnnnnnnnnnnnnnnnnnnnnnnnnnnnnnnnnnnnnnnnnnnnnnnnnnnnnnnnnnnnnnnnnnnnnnnnnnnnnnnnnnnnnnnnnnnnnnnnnnnnnnnnnnnnnnnnnnnnnnnnnnnnnnnnnnnnnnnnnnnnnnnnnnnnnnnnnnnnnnnnnnnnnnnnnnnnnnnnnnnnnnnnnnnnnnnnnnnnnnnnnnnnnnnnnnnnnnnnnnnnnnnnnnnnnnnnnnnnnnnnnnnnnnnnnnnnnnnnnnnnnnnnnnnnnnnnnnnnnnnnnnnnnnnnnnnnnnnnnnnnnnnnnnnnnnnnnnnnnnnntatatagtttactccctattattagttttaatactaactttataagtaaaagtaagttctaattcttacttaatactattaagccctaacgctaccgatactataagcgctaaggtacttagttttttaactataaatcccccttagtctctttataggtatctatatagtagtctggttttctatacttaaagtagctactataagggatactattagggtttattttttatttattatacttatacttcttattaggttttttgccctatttatccttatctttatttttagacttatccttatatttctttatatctaatataaataaggtataagagctaagactagtatctaggcttagatctattttagtagtattattcttactactactagtacttttctctttctatatataaagtgctttttatattaactagaaataatatacttctatatattccttatatctagtagtatattagtagttagcagctatatatagtaattatataaatatataccaagatagatcttagaggagaaccctccttttcataattatactcattttaccctttggtctagtatcctactacttataccatataaaacagcctctcttttattcaataccttttatctataatagaaaacctctttataataaggatatcgacctactattaagttttaaataagtataaaaatcactattctagaataaatagaaggaagctatagaaaaatagcttaataaccttactataaagagaatatagatactaatcctaaagctactaaaggtaaaagtccttctaggataatagtattttactattaaaataaatataagagataaagtctatagctttaaggtaagataggttatctatagtaatttctaggagaagagcgataacttaagtgagtcttatatactagttatattagaaataataattaaaattatcctaacgcttattatagtctatagccttaaataatactaagtagattttatagtagcttaccttaatatatctagagaagatatagagatagtatatataagataactaataggttttaagtttatagatatagaaggaaatttaaagtaataggtatatatacttaactaggctctttttagtctataagactctgccttcctctagaataaggagatagactataagctttaataaactagctttaggctacttaaggataatctatatatctatattaagataggaaagaactatatagatctaataattataataatctatattaataactttattattactatatctatatctagaaagattaacttagttataaagtagcttaaggaatattataatataaaagacctaagagaactaaagtaatatcttaattatatacttaatagaaattataatattaagataattactatatcttaagaagcctatatataaaagattctatatattataaatactataggaataaaagaaatactactactactaggatagagagagtctaacctaaaagatattaactctaatctacttaataaaaagaactttaaatactactagatagtagtaggaatatttaactaacttactattaagataagactagatattagatttactattatatacttataatatagactagtaataccgactttttctaatcttaaggtaataagatatattattaagtaccttagatataaccctaagataggactaatctttagaaagttagataagctataatttatagtatttatagatatattatatatagactagatagactctaaattaactaaaggatatatctaattttttataggagtcctagtagtatagtctactaaaaagtagataattatagcgaactctataataatagtagaatagtatatactcgaccagctagcctaggatactatatagcttactaaggttatagacttattaaacctactaagacccgatcctacagttatctatactaataatattaatttatagttactactaataaagaagggaggtaagtctactactagatagctggtactctgatagttctttgtaaaagatactatagcttaaggatatataaatatcctaagagttaatataaaacaaaacgtagcggacggatttacgaaggtacttcctaaggagtaattctaagctttcctaaagcttattaggatgacttagttacaaaaggaaaatttgagggtttttataactaccacgattacaatattttaagatcatcatttgaaaaaagaaaaaacaggggatatgagatctataggggggatattaggtgaccggaaggcggttacccatgtgggtccagatcactagatagctccgctccctcttcctctctttctctctctctcctcgtctatcagatcttagcgaatccatactagttgttttcccttttcaggcataacgtagttagatacgccattaattatgtacttctatttctgagaagaagaagcattaatgagaaatctgcagagagttatgggttgatagagtagcgcaaactgcgaaactcagagctatatatcttatatcttaggatttagaaaaaagctgtttagtattactacgtagtgtagtggggaaagtcgggatgcctagtttgtcggagtatgcaagtcagcataccggaggataccggaggatctattaatcctaacaatg

SEQ ID NO: 31 - DNA, 9417 bp, Penicillium roqueforti
  misc_feature (1273)..(7734): n is a, c, g, or t
acctactaatagtagattttatagtattaatactcccttagaatataaccaagaagtccctattctttattaaaagaggctataaacctactatatctttcgattagaaggactgagaaactttaacctagaataaataagaagtaatagatatactatcctacctttaggatatctagatagagataaaaaatcagattaaaaagtcttagtaattatagatccgataagtaaataaatatcgctaagaagaggattttaatataggcgattctatatttataataataaaggattagtagtaagaccggcctagtcgaaagctcttctatttagtaagtagtccttataagattattaagaaagtaggatattcttattgctttaaacttctagaatctattaagatttacctaattttctatctaagtaagctttagaaagcagtaataacagagctattactaggacagtatctagacccactactactagtataaattagtaaaaccgataagtaggaggtagaaaagatccttaatattaggacttactaccggaaattatagtataaggtttaatggctaggatataacctagatctataatagtatctagtaggtaacttctggaatataccagataagatcaaggaattccataaggcctacctagcaaaaccaggaccgctaatacaactacaggaatagattaaggtagtggaagaagacagaatattagatgaccacattaataatagaaagcctgtatttagggactaaatatattcttagccgggggttatataacgatctaggtaggagcgacttccctcgttccttctaagaagggcaaacgagcttttatactagaagtaaacaactaaataggaaggatataagaaggaggaatacccttatagatagttttcccttttcttcttctctccttatgcttagaattttaacataaatgcactctttccttaaacgacttggcatataacataggttatatattttattaaacagtaccctacccttatatcccgattcttaagatattataattataagtacgcgaaatataaagacctaaggattattagagagtggtttaatctagtttaaaaaaccattctttagtatagaatcgatctagataatatttataactttaataagacgggttttactataggattaactataatagtaaaggttataactagaagtaaatactatagttagagattacttttataacctagaannnnnnnnnnnnnnnnnnnnnnnnnnnnnnnnnnnnnnnnnnnnnnnnnnnnnnnnnnnnnnnnnnnnnnnnnnnnnnnnnnnnnnnnnnnnnnnnnnnnnnnnnnnnnnnnnnnnnnnnnnnnnnnnnnnnnnnnnnnnnnnnnnnnnnnnnnnnnnnnnnnnnnnnnnnnnnnnnnnnnnnnnnnnnnnnnnnnnnnnnnnnnnnnnnnnnnnnnnnnnnnnnnnnnnnnnnnnnnnnnnnnnnnnnnnnnnnnnnnnnnnnnnnnnnnnnnnnnnnnnnnnnnnnnnnnnnnnnnnnnnnnnnnnnnnnnnnnnnnnnnnnnnnnnnnnnnnnnnnnnnnnnnnnnnnnnnnnnnnnnnnnnnnnnnnnnnnnnnnnnnnnnnnnnnnnnnnnnnnnnnnnnnnnnnnnnnnnnnnnnnnnnnnnnnnnnnnnnnnnnnnnnnnnnnnnnnnnnnnnnnnnnnnnnnnnnnnnnnnnnnnnnnnnnnnnnnnnnnnnnnnnnnnnnnnnnnnnnnnnnnnnnnnnnnnnnnnnnnnnnnnnnnnnnnnnnnnnnnnnnnnnnnnnnnnnnnnnnnnnnnnnnnnnnnnnnnnnnnnnnnnnnnnnnnnnnnnnnnnnnnnnnnnnnnnnnnnnnnnnnnnnnnnnnnnnnnnnnnnnnnnnnnnnnnnnnnnnnnnnnnnnnnnnnnnnnnnnnnnnnnnnnnnnnnnnnnnnnnnnnnnnnnnnnnnnnnnnnnnnnnnnnnnnnnnnnnnnnnnnnnnnnnnnnnnnnnnnnnnnnnnnnnnnnnnnnnnnnnnnnnnnnnnnnnnnnnnnnnnnnnnnnnnnnnnnnnnnnnnnnnnnnnnnnnnnnnnnnnnnnnnnnnnnnnnnnnnnnnnnnnnnnnnnnnnnnnnnnnnnnnnnnnnnnnnnnnnnnnnnnnnnnnnnnnnnnnnnnnnnnnnnnnnnnnnnnnnnnnnnnnnnnnnnnnnnnnnnnnnnnnnnnnnnnnnnnnnnnnnnnnnnnnnnnnnnnnnnnnnnnnnnnnnnnnnnnnnnnnnnnnnnnnnnnnnnnnnnnnnnnnnnnnnnnnnnnnnnnnnnnnnnnnnnnnnnnnnnnnnnnnnnnnnnnnnnnnnnnnnnnnnnnnnnnnnnnnnnnnnnnnnnnnnnnnnnnnnnnnnnnnnnnnnnnnnnnnnnnnnnnnnnnnnnnnnnnnnnnnnnnnnnnnnnnnnnnnnnnnnnnnnnnnnnnnnnnnnnnnnnnnnnnnnnnnnnnnnnnnnnnnnnnnnnnnnnnnnnnnnnnnnnnnnnnnnnnnnnnnnnnnnnnnnnnnnnnnnnnnnnnnnnnnnnnnnnnnnnnnnnnnnnnnnnnnnnnnnnnnnnnnnnnnnnnnnnnnnnnnnnnnnnnnnnnnnnnnnnnnnnnnnnnnnnnnnnnnnnnnnnnnnnnnnnnnnnnnnnnnnnnnnnnnnnnnnnnnnnnnnnnnnnnnnnnnnnnnnnnnnnnnnnnnnnnnnnnnnnnnnnnnnnnnnnnnnnnnnnnnnnnnnnnnnnnnnnnnnnnnnnnnnnnnnnnnnnnnnnnnnnnnnnnnnnnnnnnnnnnnnnnnnnnnnnnnnnnnnnnnnnnnnnnnnnnnnnnnnnnnnnnnnnnnnnnnnnnnnnnnnnnnnnnnnnnnnnnnnnnnnnnnnnnnnnnnnnnnnnnnnnnnnnnnnnnnnnnnnnnnnnnnnnnnnnnnnnnnnnnnnnnnnnnnnnnnnnnnnnnnnnnnnnnnnnnnnnnnnnnnnnnnnnnnnnnnnnnnnnnnnnnnnnnnnnnnnnnnnnnnnnnnnnnnnnnnnnnnnnnnnnnnnnnnnnnnnnnnnnnnnnnnnnnnnnnnnnnnnnnnnnnnnnnnnnnnnnnnnnnnnnnnnnnnnnnnnnnnnnnnnnnnnnnnnnnnnnnnnnnnnnnnnnnnnnnnnnnnnnnnnnnnnnnnnnnnnnnnnnnnnnnnnnnnnnnnnnnnnnnnnnnnnnnnnnnnnnnnnnnnnnnnnnnnnnnnnnnnnnnnnnnnnnnnnnnnnnnnnnnnnnnnnnnnnnnnnnnnnnnnnnnnnnnnnnnnnnnnnnnnnnnnnnnnnnnnnnnnnnnnnnnnnnnnnnnnnnnnnnnnnnnnnnnnnnnnnnnnnnnnnnnnnnnnnnnnnnnnnnnnnnnnnnnnnnnnnnnnnnnnnnnnnnnnnnnnnnnnnnnnnnnnnnnnnnnnnnnnnnnnnnnnnnnnnnnnnnnnnnnnnnnnnnnnnnnnnnnnnnnnnnnnnnnnnnnnnnnnnnnnnnnnnnnnnnnnnnnnnnnnnnnnnnnnnnnnnnnnnnnnnnnnnnnnnnnnnnnnnnnnnnnnnnnnnnnnnnnnnnnnnnnnnnnnnnnnnnnnnnnnnnnnnnnnnnnnnnnnnnnnnnnnnnnnnnnnnnnnnnnnnnnnnnnnnnnnnnnnnnnnnnnnnnnnnnnnnnnnnnnnnnnnnnnnnnnnnnnnnnnnnnnnnnnnnnnnnnnnnnnnnnnnnnnnnnnnnnnnnnnnnnnnnnnnnnnnnnnnnnnnnnnnnnnnnnnnnnnnnnnnnnnnnnnnnnnnnnnnnnnnnnnnnnnnnnnnnnnnnnnnnnnnnnnnnnnnnnnnnnnnnnnnnnnnnnnnnnnnnnnnnnnnnnnnnnnnnnnnnnnnnnnnnnnnnnnnnnnnnnnnnnnnnnnnnnnnnnnnnnnnnnnnnnnnnnnnnnnnnnnnnnnnnnnnnnnnnnnnnnnnnnnnnnnnnnnnnnnnnnnnnnnnnnnnnnnnnnnnnnnnnnnnnnnnnnnnnnnnnnnnnnnnnnnnnnnnnnnnnnnnnnnnnnnnnnnnnnnnnnnnnnnnnnnnnnnnnnnnnnnnnnnnnnnnnnnnnnnnnnnnnnnnnnnnnnnnnnnnnnnnnnnnnnnnnnnnnnnnnnnnnnnnnnnnnnnnnnnnnnnnnnnnnnnnnnnnnnnnnnnnnnnnnnnnnnnnnnnnnnnnnnnnnnnnnnnnnnnnnnnnnnnnnnnnnnnnnnnnnnnnnnnnnnnnnnnnnnnnnnnnnnnnnnnnnnnnnnnnnnnnnnnnnnnnnnnnnnnnnnnnnnnnnnnnnnnnnnnnnnnnnnnnnnnnnnnnnnnnnnnnnnnnnnnnnnnnnnnnnnnnnnnnnnnnnnnnnnnnnnnnnnnnnnnnnnnnnnnnnnnnnnnnnnnnnnnnnnnnnnnnnnnnnnnnnnnnnnnnnnnnnnnnnnnnnnnnnnnnnnnnnnnnnnnnnnnnnnnnnnnnnnnnnnnnnnnnnnnnnnnnnnnnnnnnnnnnnnnnnnnnnnnnnnnnnnnnnnnnnnnnnnnnnnnnnnnnnnnnnnnnnnnnnnnnnnnnnnnnnnnnnnnnnnnnnnnnnnnnnnnnnnnnnnnnnnnnnnnnnnnnnnnnnnnnnnnnnnnnnnnnnnnnnnnnnnnnnnnnnnnnnnnnnnnnnnnnnnnnnnnnnnnnnnnnnnnnnnnnnnnnnnnnnnnnnnnnnnnnnnnnnnnnnnnnnnnnnnnnnnnnnnnnnnnnnnnnnnnnnnnnnnnnnnnnnnnnnnnnnnnnnnnnnnnnnnnnnnnnnnnnnnnnnnnnnnnnnnnnnnnnnnnnnnnnnnnnnnnnnnnnnnnnnnnnnnnnnnnnnnnnnnnnnnnnnnnnnnnnnnnnnnnnnnnnnnnnnnnnnnnnnnnnnnnnnnnnnnnnnnnnnnnnnnnnnnnnnnnnnnnnnnnnnnnnnnnnnnnnnnnnnnnnnnnnnnnnnnnnnnnnnnnnnnnnnnnnnnnnnnnnnnnnnnnnnnnnnnnnnnnnnnnnnnnnnnnnnnnnnnnnnnnnnnnnnnnnnnnnnnnnnnnnnnnnnnnnnnnnnnnnnnnnnnnnnnnnnnnnnnnnnnnnnnnnnnnnnnnnnnnnnnnnnnnnnnnnnnnnnnnnnnnnnnnnnnnnnnnnnnnnnnnnnnnnnnnnnnnnnnnnnnnnnnnnnnnnnnnnnnnnnnnnnnnnnnnnnnnnnnnnnnnnnnnnnnnnnnnnnnnnnnnnnnnnnnnnnnnnnnnnnnnnnnnnnnnnnnnnnnnnnnnnnnnnnnnnnnnnnnnnnnnnnnnnnnnnnnnnnnnnnnnnnnnnnnnnnnnnnnnnnnnnnnnnnnnnnnnnnnnnnnnnnnnnnnnnnnnnnnnnnnnnnnnnnnnnnnnnnnnnnnnnnnnnnnnnnnnnnnnnnnnnnnnnnnnnnnnnnnnnnnnnnnnnnnnnnnnnnnnnnnnnnnnnnnnnnnnnnnnnnnnnnnnnnnnnnnnnnnnnnnnnnnnnnnnnnnnnnnnnnnnnnnnnnnnnnnnnnnnnnnnnnnnnnnnnnnnnnnnnnnnnnnnnnnnnnnnnnnnnnnnnnnnnnnnnnnnnnnnnnnnnnnnnnnnnnnnnnnnnnnnnnnnnnnnnnnnnnnnnnnnnnnnnnnnnnnnnnnnnnnnnnnnnnnnnnnnnnnnnnnnnnnnnnnnnnnnnnnnnnnnnnnnnnnnnnnnnnnnnnnnnnnnnnnnnnnnnnnnnnnnnnnnnnnnnnnnnnnnnnnnnnnnnnnnnnnnnnnnnnnnnnnnnnnnnnnnnnnnnnnnnnnnnnnnnnnnnnnnnnnnnnnnnnnnnnnnnnnnnnnnnnnnnnnnnnnnnnnnnnnnnnnnnnnnnnnnnnnnnnnnnnnnnnnnnnnnnnnnnnnnnnnnnnnnnnnnnnnnnnnnnnnnnnnnnnnnnnnnnnnnnnnnnnnnnnnnnnnnnnnnnnnnnnnnnnnnnnnnnnnnnnnnnnnnnnnnnnnnnnnnnnnnnnnnnnnnnnnnnnnnnnnnnnnnnnnnnnnnnnnnnnnnnnnnnnnnnnnnnnnnnnnnnnnnnnnnnnnnnnnnnnnnnnnnnnnnnnnnnnnnnnnnnnnnnnnnnnnnnnnnnnnnnnnnnnnnnnnnnnnnnnnnnnnnnnnnnnnnnnnnnnnnnnnnnnnnnnnnnnnnnnnnnnnnnnnnnnnnnnnnnnnnnnnnnnnnnnnnnnnnnnnnnnnnnnnnnnnnnnnnnnnnnnnnnnnnnnnnnnnnnnnnnnnnnnnnnnnnnnnnnnnnnnnnnnnnnnnnnnnnnnnnnnnnnnnnnnnnnnnnnnnnnnnnnnnnnnnnnnnnnnnnnnnnnnnnnnnnnnnnnnnnnnnnnnnnnnnnnnnnnnnnnnnnnnnnnnnnnnnnnnnnnnnnnnnnnnnnnnnnnnnnnnnnnnnnnnnnnnnnnnnnnnnnnnnnnnnnnnnnnnnnnnnnnnnnnnnnnnnnnnnnnnnnnnnnnnnnnnnnnnnnnnnnnnnnnnnnnnnnnnnnnnnnnnnnnnnnnnnnnnnnnnnnnnnnnnnnnnnnnnnnnnnnnnnnnnnnnnnnnnnnnnnnnnnnnnnnnnnnnnnnnnnnnnnnnnnnnnnnnnnnnnnnnnnnnnnnnnnnnnnnnnnnnnnnnnnnnnnnnnnnnnnnnnnnnnnnnnnnnnnnnnnnnnnnnnnnnnnnnnnnnnnnnnnnnnnnnnnnnnnnnnnnnnnnnnnnnnnnnnnnnnnnnnnnnnnnnnnnnnnnnnnnnnnnnnnnnnnnnnnnnnnnnnnnnnnnnnnnnnnnnnnnnnnnnnnnnnnnnnnnnnnnnnnnnnnnnnnnnnnnnnnnnnnnnnnnnnnnnnnnnnnnnnnnnnnnnnnnnnnnnnnnnnnnnnnnnnnnnnnnnnnnnnnnnnnnnnnnnnnnnnnnnnnnnnnnnnnnnnnnnnnnnnnnnnnnnnnnnnnnnnnnnnnnnnnnnnnnnnnnnnnnnnnnnnnnnnnnnnnnnnnnnnnnnnnnnnnnnnnnnnnnnnnnnnnnnnnnnnnnnnnnnnnnnnnnnnnnnnnnnnnnnnnnnnnnnnnnnnnnnnnnnnnnnnnnnnnnnnnnnnnnnnnnnnnnnnnnnnnnnnnnnnnnnnnnnnnnnnnnnnnnnnnnnnnnnnnnnnnnnnnnnnnnnnnnnnnnnnnnnnnnnnnnnnnnnnnnnnnnnnnnnnnnnnnnnnnnnnnnnnnnnnnnnnnnnnnnnnnnnnnnnnnnnnnnnnnnnnnnnnnnnnnnnnnnnnnnnnnnnnnnnnnnnnnnnnnnnnnnnnnnnnnnnnnnnnnnnnnnnnnnnnnnnnnnnnnnnnnnnnnnnnnnnnnnnnnnnnnnnnnnnnnnnnnnnnnnnnnnnnnnnnnnnnnnnnnnnnnnnnnnnnnnnnnnnnnnnnnnnnnnnnnnnnnnnnnnnnnnnnnnnnnnnnnnnnnnnnnnnnnnnnnnnnnnnnnnnnnnnnnnnnnnnnnnnnnnnnnnnnnnnnnnnnnnnnnnnnnnnnnnnnnnnnnnnnnnnnnnnnnnnnnnnnnnnnnnnnnnnnnnnnnnnnnnnnnnnnnnnnnnnnnnnnnnnnnnnnnnnnnnnnnnnnnnnnnnnnnnnnnnnnnnnnnnnnnnnnnnnnnnnnnnnnnnnnnnnnnnnnnnnnnnnnnnnnnnncgtaatcggtaagggagtggccactgtaagcgagtggccaccctacccaagagtatagttttctaaggtaaatatttcaaccagaacgccattaaattaattaaactaaaaaggatcatttatctggacacctattgatcttatgccctatctttccacacccactacaccttggtgcagcccgtggtcgtggttccaaccctgattgagtacttccgctcggggggtctaggggtatttctaatgcttccaccaacccagcaatcatttcagaagcttcctgaacggagaggccttcttcggcaggtatctgccttttagatcgcgcccacttttgcttcttattctcattttcatcccgtaaatccttatgatctaatacacgcttagaagggcttattaggcttcgagattaggtacaaagtaaagctttgattgacgaagcctatcgatgtagatctttgccattgaaaggggtttttagagtgaaattccggcttgaatcgctacccctactaagagggggggttggtattcaaagataaatattaagttttgaaagtacccgatcaggtaaaaaaggtattaaaccagctgctaagaagctatttttaattatctccaatttcaaagcttcaattcgtacagaggggtatacttctaggaacttaagtttatcaatatagttgatcctagtccgtatttttatcttaactaaccagctatataaccgttttactaccgcaaaacaaccgatatcgagggattataaaaggtaagataaatacagtagtatacaaattagtataatcttatttttcttataaatctcgtcgaattttagggttaaatagcttctatagctatcgagtaccaaaagtcgatatactccctttatataagaagaagtagttagaataaagagcttttacagctaataaaggcctattttatctaacgtctacctatttagactaactttaaagtaccagtcgctaggaaggccttcgaaccatgatttaaggaagaccttacctttaaaaataatatacagagggagggcctaccctaccgagtttatacattcaattacagtcacttactcgcgatttctaggttataaaagtgatttctaaccgtagtattcacttcttattataacctttactattatagttaatcctattacaaatccagtcttattaaagttataaatatcgtctagattaattctaaattaaatgatagttttttaaataagattaaaccattctctaatgatttttaggtctttacatttcatacactcgtaattataatatcttaagaaccgagaagaaagaagagggtatcgttttataaaattataaacccatttttcgccgaccgaaagaactggggtagttccacgctatttaagaagaagattcgctatttcttataccatagagggccaggggactgctccacgagaatccatagagagaatctatttttaaagagattcctcttcagtttctgtcaatttctgtaaatttgcgcatgtagtacttcgttgagaacggccagagaggcagtcgcgtaaagttatacgcgggacatcaaaagtacgtgcagcaagagtaattgagctgatatctttattttgaagagcctggatagctaataaaagcctaccctctt

SEQ ID NO: 32 - DNA, 9012 bp, Penicillium roqueforti
  misc_feature (3461)..(7884): n is a, c, g, or t
gtggtgaaggtggtgaagtggtaaaggtggtgaaggtggtaaaaatgatcacagtggattcaatctcatgacagtcgttctttaaacatgtatgctacgctacgttgtctaatttggagctggcgtggtacaaacattgccattctcataatgaggctccaccatctccaattctactacctaccagcataatcctactcttattgatgccgatagcgatacaaatggccaagcctcaaagattaataacggtgaccgcggccgcattataatatactagaattcatagcatcgttcaattctaataccacattcaataactatttaacattactagtcccacacagtaaggtcaggacacctaccatacatcacattagacttcagcttcaacacactcacgacacaagtcggttcatacgatatccgtaccggccaggtcatgacttccgttcatcaattgattagccaaaatcccggtaaagctttagaaataaaagcatcgctagataggtaagaccaaatctccgataaatgctacatcagttgcatgatcctattagttctactcttttcgggcacctccccaactcatcgtatcactgccgtcgaaagccaagtcaagcagccagtgggaacgttaaaggcaccaatatccaagattcaccgtcccaatctagatctagcgagtgtgttaccgaatctgttagcccaaatacagtctaacctagcgcctcagcgaagggatgattgtaagattacgttccctatcaagaaacctcagatactattagtaaatctattgggtacaggtcatatcttaaccagaattgaaaagctgaaaagacaaggatggcccaaattgaaacgactgagtcaggctatttatcgaaattcaaaccagatttcgcgtcttcgtgcacacctgtcattcttacaagcagagctcaaaaaacggatatcatctcgaaatggttcattaaatgccattttatatatacaggagctgactcaagataacctatccccagggcgaatatatttaattgggtctttgttagttcagcattatctcgagaaatggagtaaggggccagttgatagaaataggatagatgttccggggtcgaccgctctgttaattgaccaaattccttccctatacacgtgacattatttttagctactttaggcagaagtgatatcaaagtattatctcatcggtcatacaataaacaatagcacaatgattgagttaaagctggtactagctttcaataattctacattacgacgcggcatatattacttcaagcagtctaagaaacttcttaggtagcgatagctttcgatatattgaagggcattaccaacgcacaagctataggaaaagcaagctcccccattttgaaagttctatcagattcaaattacatatcgagggacactatatacagtagtagttataccagcttagtcattaaacctatccaagaatgattgtgggccgaagatctgacttcgccagcctgatcactcgtaactacatgccctcctattccggcagttaatactgtcaattatctacctgccctcacagcacctatgtatcgtggactcccaatctctggtagtttatcggccacatttatctactactgcccatagggtgaggcggaaaatcgcgctagccttacttgtctggtttgccagaacactgtcctcgtcaaataagtaccatatcttaaagttttatacaagtgcttccttgaattgcgatacaatatggttctcagttatcccattaattgcaaaatctccctcggttgagataactcctttagcttcttgcttctagggttaagaacatcctacagtattacagtgtcaaagccatccttgtaatggttagcagtattattttctattagtggttcaaccgtatgattggtccatcttttctgctattgcattgccaacccgtagatcgtcattcggctaggagtgtaggaaattctatacaaggctgatagcagatggtagagctaaacattgctcgcctctatggtgcacatcctgtgtggatcggaacttctcgataactgtgtctcctataagagtttgtgttggtgggctcctacatcgcatatgagcttatagagagagctactgtggtacaccaagtatattatagttttcacgtagatatatagaattaaggaaattcctcctctagaaatatcactatagtagagtgaccagtcgtactcaggctacgataccaggctagcagttcgaccatcatcttctaccctacaatgaggcttgtaggtcggtgtacattctcctaataggctcgaagacaacgcgcgctaaacgtgatccattcactaggcagagctcttcgcattccacttaggcttcacatgctctttcaaccaggttacagattgtgttctgaaaatttcggagaagttgatagacaaaatcagtcgagcgctcggtgccggatttataaagcctttgtagttcggtgaacgtatgttctgtaagctcttagagtagcttgaaaagggaatagcaatcgcggtaatatgcattataagcttattattagccgatctaacgtacaatctatacaatatcctccatggtactatcacagaagagagaaagaatcacaatcgactctcaggttctatatttacataatgagagataccaattacatagtcagagagtcggtcggtcggtcggtcaagttgaatatcggtaaggcgaaaaaggaacttttggcaacccaatataaatatactcatttctgaggttccggctattaagataggtggttattacagagacaatggttcctcgcttcaccgtcctatccctcaacaacgcgcaaagcgtcattgccatcctctatatacccccataaacatcccatctcatagtcaataaggacactctgagacccactcttgcctacaaagccaaatgctcgcccgagggattactgctcgagagagccggtacttactttgacttcgcaaaatagacactctcaattaccgaaacctacgcaactatgccatcggtatcattgtgggcattcttggattctcctactttgttatttatttactattattcttgattttccacttcccctcgtctcaacagtcaatcctatacactctggcagtgatagcgtttggtagaggaagcgccatatggtatctagatattgtctttcaaaatagcttcagtatattccagaagacaaaagtaacgaaagagcaagattccatatggtttagtggtttattcctggtctagacagcagctcttcccacaatcgcttttctctttccagcccaaccactgatacagcttggatacgcatcggctttcaccctaatcgctattagaagcctctcggacggttatctcaaagacannnnnnnnnnnnnnnnnnnnnnnnnnnnnnnnnnnnnnnnnnnnnnnnnnnnnnnnnnnnnnnnnnnnnnnnnnnnnnnnnnnnnnnnnnnnnnnnnnnnnnnnnnnnnnnnnnnnnnnnnnnnnnnnnnnnnnnnnnnnnnnnnnnnnnnnnnnnnnnnnnnnnnnnnnnnnnnnnnnnnnnnnnnnnnnnnnnnnnnnnnnnnnnnnnnnnnnnnnnnnnnnnnnnnnnnnnnnnnnnnnnnnnnnnnnnnnnnnnnnnnnnnnnnnnnnnnnnnnnnnnnnnnnnnnnnnnnnnnnnnnnnnnnnnnnnnnnnnnnnnnnnnnnnnnnnnnnnnnnnnnnnnnnnnnnnnnnnnnnnnnnnnnnnnnnnnnnnnnnnnnnnnnnnnnnnnnnnnnnnnnnnnnnnnnnnnnnnnnnnnnnnnnnnnnnnnnnnnnnnnnnnnnnnnnnnnnnnnnnnnnnnnnnnnnnnnnnnnnnnnnnnnnnnnnnnnnnnnnnnnnnnnnnnnnnnnnnnnnnnnnnnnnnnnnnnnnnnnnnnnnnnnnnnnnnnnnnnnnnnnnnnnnnnnnnnnnnnnnnnnnnnnnnnnnnnnnnnnnnnnnnnnnnnnnnnnnnnnnnnnnnnnnnnnnnnnnnnnnnnnnnnnnnnnnnnnnnnnnnnnnnnnnnnnnnnnnnnnnnnnnnnnnnnnnnnnnnnnnnnnnnnnnnnnnnnnnnnnnnnnnnnnnnnnnnnnnnnnnnnnnnnnnnnnnnnnnnnnnnnnnnnnnnnnnnnnnnnnnnnnnnnnnnnnnnnnnnnnnnnnnnnnnnnnnnnnnnnnnnnnnnnnnnnnnnnnnnnnnnnnnnnnnnnnnnnnnnnnnnnnnnnnnnnnnnnnnnnnnnnnnnnnnnnnnnnnnnnnnnnnnnnnnnnnnnnnnnnnnnnnnnnnnnnnnnnnnnnnnnnnnnnnnnnnnnnnnnnnnnnnnnnnnnnnnnnnnnnnnnnnnnnnnnnnnnnnnnnnnnnnnnnnnnnnnnnnnnnnnnnnnnnnnnnnnnnnnnnnnnnnnnnnnnnnnnnnnnnnnnnnnnnnnnnnnnnnnnnnnnnnnnnnnnnnnnnnnnnnnnnnnnnnnnnnnnnnnnnnnnnnnnnnnnnnnnnnnnnnnnnnnnnnnnnnnnnnnnnnnnnnnnnnnnnnnnnnnnnnnnnnnnnnnnnnnnnnnnnnnnnnnnnnnnnnnnnnnnnnnnnnnnnnnnnnnnnnnnnnnnnnnnnnnnnnnnnnnnnnnnnnnnnnnnnnnnnnnnnnnnnnnnnnnnnnnnnnnnnnnnnnnnnnnnnnnnnnnnnnnnnnnnnnnnnnnnnnnnnnnnnnnnnnnnnnnnnnnnnnnnnnnnnnnnnnnnnnnnnnnnnnnnnnnnnnnnnnnnnnnnnnnnnnnnnnnnnnnnnnnnnnnnnnnnnnnnnnnnnnnnnnnnnnnnnnnnnnnnnnnnnnnnnnnnnnnnnnnnnnnnnnnnnnnnnnnnnnnnnnnnnnnnnnnnnnnnnnnnnnnnnnnnnnnnnnnnnnnnnnnnnnnnnnnnnnnnnnnnnnnnnnnnnnnnnnnnnnnnnnnnnnnnnnnnnnnnnnnnnnnnnnnnnnnnnnnnnnnnnnnnnnnnnnnnnnnnnnnnnnnnnnnnnnnnnnnnnnnnnnnnnnnnnnnnnnnnnnnnnnnnnnnnnnnnnnnnnnnnnnnnnnnnnnnnnnnnnnnnnnnnnnnnnnnnnnnnnnnnnnnnnnnnnnnnnnnnnnnnnnnnnnnnnnnnnnnnnnnnnnnnnnnnnnnnnnnnnnnnnnnnnnnnnnnnnnnnnnnnnnnnnnnnnnnnnnnnnnnnnnnnnnnnnnnnnnnnnnnnnnnnnnnnnnnnnnnnnnnnnnnnnnnnnnnnnnnnnnnnnnnnnnnnnnnnnnnnnnnnnnnnnnnnnnnnnnnnnnnnnnnnnnnnnnnnnnnnnnnnnnnnnnnnnnnnnnnnnnnnnnnnnnnnnnnnnnnnnnnnnnnnnnnnnnnnnnnnnnnnnnnnnnnnnnnnnnnnnnnnnnnnnnnnnnnnnnnnnnnnnnnnnnnnnnnnnnnnnnnnnnnnnnnnnnnnnnnnnnnnnnnnnnnnnnnnnnnnnnnnnnnnnnnnnnnnnnnnnnnnnnnnnnnnnnnnnnnnnnnnnnnnnnnnnnnnnnnnnnnnnnnnnnnnnnnnnnnnnnnnnnnnnnnnnnnnnnnnnnnnnnnnnnnnnnnnnnnnnnnnnnnnnnnnnnnnnnnnnnnnnnnnnnnnnnnnnnnnnnnnnnnnnnnnnnnnnnnnnnnnnnnnnnnnnnnnnnnnnnnnnnnnnnnnnnnnnnnnnnnnnnnnnnnnnnnnnnnnnnnnnnnnnnnnnnnnnnnnnnnnnnnnnnnnnnnnnnnnnnnnnnnnnnnnnnnnnnnnnnnnnnnnnnnnnnnnnnnnnnnnnnnnnnnnnnnnnnnnnnnnnnnnnnnnnnnnnnnnnnnnnnnnnnnnnnnnnnnnnnnnnnnnnnnnnnnnnnnnnnnnnnnnnnnnnnnnnnnnnnnnnnnnnnnnnnnnnnnnnnnnnnnnnnnnnnnnnnnnnnnnnnnnnnnnnnnnnnnnnnnnnnnnnnnnnnnnnnnnnnnnnnnnnnnnnnnnnnnnnnnnnnnnnnnnnnnnnnnnnnnnnnnnnnnnnnnnnnnnnnnnnnnnnnnnnnnnnnnnnnnnnnnnnnnnnnnnnnnnnnnnnnnnnnnnnnnnnnnnnnnnnnnnnnnnnnnnnnnnnnnnnnnnnnnnnnnnnnnnnnnnnnnnnnnnnnnnnnnnnnnnnnnnnnnnnnnnnnnnnnnnnnnnnnnnnnnnnnnnnnnnnnnnnnnnnnnnnnnnnnnnnnnnnnnnnnnnnnnnnnnnnnnnnnnnnnnnnnnnnnnnnnnnnnnnnnnnnnnnnnnnnnnnnnnnnnnnnnnnnnnnnnnnnnnnnnnnnnnnnnnnnnnnnnnnnnnnnnnnnnnnnnnnnnnnnnnnnnnnnnnnnnnnnnnnnnnnnnnnnnnnnnnnnnnnnnnnnnnnnnnnnnnnnnnnnnnnnnnnnnnnnnnnnnnnnnnnnnnnnnnnnnnnnnnnnnnnnnnnnnnnnnnnnnnnnnnnnnnnnnnnnnnnnnnnnnnnnnnnnnnnnnnnnnnnnnnnnnnnnnnnnnnnnnnnnnnnnnnnnnnnnnnnnnnnnnnnnnnnnnnnnnnnnnnnnnnnnnnnnnnnnnnnnnnnnnnnnnnnnnnnnnnnnnnnnnnnnnnnnnnnnnnnnnnnnnnnnnnnnnnnnnnnnnnnnnnnnnnnnnnnnnnnnnnnnnnnnnnnnnnnnnnnnnnnnnnnnnnnnnnnnnnnnnnnnnnnnnnnnnnnnnnnnnnnnnnnnnnnnnnnnnnnnnnnnnnnnnnnnnnnnnnnnnnnnnnnnnnnnnnnnnnnnnnnnnnnnnnnnnnnnnnnnnnnnnnnnnnnnnnnnnnnnnnnnnnnnnnnnnnnnnnnnnnnnnnnnnnnnnnnnnnnnnnnnnnnnnnnnnnnnnnnnnnnnnnnnnnnnnnnnnnnnnnnnnnnnnnnnnnnnnnnnnnnnnnnnnnnnnnnnnnnnnnnnnnnnnnnnnnnnnnnnnnnnnnnnnnnnnnnnnnnnnnnnnnnnnnnnnnnnnnnnnnnnnnnnnnnnnnnnnnnnnnnnnnnnnnnnnnnnnnnnnnnnnnnnnnnnnnnnnnnnnnnnnnnnnnnnnnnnnnnnnnnnnnnnnnnnnnnnnnnnnnnnnnnnnnnnnnnnnnnnnnnnnnnnnnnnnnnnnnnnnnnnnnnnnnnnnnnnnnnnnnnnnnnnnnnnnnnnnnnnnnnnnnnnnnnnnnnnnnnnnnnnnnnnnnnnnnnnnnnnnnnnnnnnnnnnnnnnnnnnnnnnnnnnnnnnnnnnnnnnnnnnnnnnnnnnnnnnnnnnnnnnnnnnnnnnnnnnnnnnnnnnnnnnnnnnnnnnnnnnnnnnnnnnnnnnnnnnnnnnnnnnnnnnnnnnnnnnnnnnnnnnnnnnnnnnnnnnnnnnnnnnnnnnnnnnnnnnnnnnnnnnnnnnnnnnnnnnnnnnnnnnnnnnnnnnnnnnnnnnnnnnnnnnnnnnnnnnnnnnnnnnnnnnnnnnnnnnnnnnnnnnnnnnnnnnnnnnnnnnnnnnnnnnnnnnnnnnnnnnnnnnnnnnnnnnnnnnnnnnnnnnnnnnnnnnnnnnnnnnnnnnnnnnnnnnnnnnnnnnnnnnnnnnnnnnnnnnnnnnnnnnnnnnnnnnnnnnnnnnnnnnnnnnnnnnnnnnnnnnnnnnnnnnnnnnnnnnnnnnnnnnnnnnnnnnnnnnnnnnnnnnnnnnnnnnnnnnnnnnnnnnnnnnnnnnnnnnnnnnnnnnnnnnnnnnnnnnnnnnnnnnnnnnnnnnnnnnnnnnnnnnnnnnnnnnnnnnnnnnnnnnggtagttagggggcggggcccgccatactggccgatgaagtctcaactcttgggttatttcttttacaataagaaaagatataaagagctggggctgatacttatagagacacagcagaggtcaattcagtatcacaccgggccacagtgatcatcataggcgcgataagttggtcctttagtggtatcaagacgtcagtgttgttcgtggtttagcctacaaggcttagcacaaataatcagacccggcgcagcagtaggcgttatatctcataaaccttagcatagaataaaatggaagtctcataatttcacataacagagctcacacttgaaagtccacaccctattgttaaccggatattttaatatacaaccttccactctaggcatactgcattattcggggccaggaatagtatatatgccatggctttgcgtagagtactaccaatagtgcagggttatcagggccgctctggtaagctcccaaaggttcactgtcaattatagtcataaccagggattaagagacgacaagaagccgtggcccttgccctggtatattgtggtcgaacttccacggatctggttgccccgcgtctttcgggtcagcgcatttgtaaggatttataggcttatatacctacagtgtaagcagttatacttcaaacttaagatacaaccagacccgcgatagtagatcagctcagtcggctactatagcagagacgtcttcgtatagtagataccttgactagttaatccaaatctttgatcttcgatcggctggctaaataggtcagtgaatcacgtctcttatagtataggaactgtctgatctgctagtctcgatatatactacaaatgtcagtacggtacaaatcccggtatataccggtccaacaggagaacttatcgagtgcatcagatataagcctctcaactagatcaagtagataaatcgtagagcaaattgcaggggtagaggacacatctacaggcttctcagcctctatcacttaccaacttggtagcaattaccaaaagacatagttcttaattaaggcctgttaagacgccttgtgcatttggcagtaactatttgcagcgatatctttaatgttt

SEQ ID NO: 33 - DNA, 8768 bp, Penicillium roqueforti
gaattcacgcccggggtcgtacggtggcccctcggtggccacttcgagaggagcttcgcagtggttgccacgttctttatcgcctagtagtaacgggctctctagttgggcttggttgttaggagcagcgctttattaaagttggcaggggcggtggaataggttttcccagcgtctgatggctcggcgctgaatatccgggaaactgctaagcgtgttcgagattgtcataagggtgccagcggtaacggcttcggtcttctcggttagagcagcctcttagagttatagctggcgatatctagccatatgttcgtataacctttttaaatcctcgatctctggctgtacccggtccatatgctctattatacctttatagggaaggataaaatcgcggaggatcttttcctcggtattagcttagtacagttggctttatacagctagcaattagctctgaggttcaggaatgtccggtaaagagaacagagcggaagagctgacactaatcgcgtcgctaggttggtcctgcgtagtaggctggcattcttactaagtactatgactagaccaagttagacgatttgtattctagtataagcgttaaactgggtctatgatcttcatcttttttaggtctattcgggagaaagtaaaagacagtacttcagctaagtataaaggagactatatagagaattcccagaaaaaaccataggaaggtcttagtccttataggagtatagcgatatagtagtgattatctaagccgatatctagtatctttgagttcgtttcagctttccagagtgtgatatattaaccgtagtagttatataattagtatactacagaacgggggtatagaaattcggcttattctttagcgtggcgggcttagaatactactactaggtcagtaactatattctctgcaaaaggataacctaggataataggtctaattgtaaaaactaggtttttaattttaagctttaaatctgccttcgggactattaggtagccgtattttatagctatataaaggctaacgaatatatagtaacgtttccagattagcgtatataggagactatagaagtcgatttataggccggggtcctatagtatcttactagtatatagtttactattagtatcctagatagtatagaactcggcgcacttcttctaagatagttcttttatcgctatataaataagcttattacttagtagaacgttatagtcgttaggtagtactagccttccttttaggtcgcgctcgtatcttatatataagggtaaccgagcgatatcttatagagatagtctactacctataataactaggacccagttactagtctagattagcctatctagttccagtttagtataagcagtatcacgagattgtattatataggaattgtcgaacgtatatcccagaaggtaaagtatatcagtcgctccctataatagactaaggtataggagtgcctttcttttcggtataataagtctagtatataagaaagagaatggttaatataaaaaaagaagtaatagaggtaggaaaaatagaacaggtatattaagtagtaagtaacagttaaataagagttagaaacttaaatcagagtaaaagtaagagttagaagtaagagttaagtaatataaggtagtaagaatagatagtaataaaagtaaaaggaaaataaaaataaagtaaggaaaacgtggtacttaggagcttactaggggtataccctaacgctccttaaagtctttaatagccttattatatccgatacagtcctcttcctatacctaacagttatccctagctaattagcctttctagtagattagatacttagtgatttaatacctagtaccgttataatagggtcaactaggcatattaataatacacttagtaagaatacagtcgaccttatagacaatatctttagggaaacgcttatctatagtcgggtagtattcgttatctaattagcgctcctagggattatcactgtctagggcgggttctaggtatataatactaataactaggtagattcttaacttagttagaatatttaaacgataagtaagcttcctaatgtattcgagtacttcgaaatacctaatataacgctattatagttaccttagtaaaacttagtttaatagtatattatatctatatcctagcttaagatagactttattaccgatattaaaaaaaatctacctataatagcggttatattagcgttttatacgtatagcagcctaagcggcagaatacttggtatctatatatatagcgatatcgggagctatagcttagcgtaaaagcaactaagggtagcgtagttcgatactatataagagtttataatgtaagtaacctatcgttatactaactaagctatttagtatagcttagagggtaggtaataggtttagctaatctttattagggtaagtagcgattgcgtactatacagtaacttcggctatctagttagtatattctaactaaccgttagtttatagataataggcagtagtaaaaaataacttagtatagataaggtcgaaaagtactttccagaggccctatataaacttagggttacaatcgctaataattactataggaatcccctaattagctatctactagaaagagagagtacctagtacctaatctttactatcccagtttatacagctaggtattattcctattaacttagtaaacttatcggttatagttatagccgcgttatatctattagtcgaaataggtatcgcgacgattagatctaaagtaatagtataaaagggtattaatagggcgataatcggttagagagaactatataggcgataacggcagatcctatgctctaaatagatagggcaatatttaatatactactttaggagcttagtacctttatagaatatgatactataaagcttatactaagctctatcgaaaccctggtatatctacttattataaaccaagttaaaaatttcctaagttatagattaaggtagatacagactctccttactattagaatttatgaaaataatcaagctattctctaggtagtagggtaacttcttaacttagggatcctactaggcgttaatactttctagagtatcgattagggctaactagcgagtatctaactagtatccttataagatataatccttagtattatcgcttagctagagtaccgatactataaggaggtatactataggttagtctactataggttatttaaatatatatagcgctaggatatcctcgagattatcttatatactaggaactgacgggtctatatatagtaggtaggaaagagcgttagcgatcttattagtttttcctagtctatagaagatatataggcgaaactattagataaactaggatatatagactaggtaaagattttagtattctaaagaaatagaacttaagtttatcgttttagtaatacctatagtactactatagtcggtatatactatagccggaaggtcgctaaaataggcctctactaagtagtataccttacagagggtctagcagagggtagaaaccttgagcttagtaggctagtaattcttctctatatctataagaagtcggctaaggaatataatcggctaaatctctatagcagagggtagctttaaaacatccttataagtaaacgtcgtctttatataatagattatagcactataccctatttcctttaaaccgtcggtattaatatagagctagtgtataggattatagtatactagctatttaggtttatagaactcggcctagagtagataaaaactttcgagcttagcttaggagggtttattaagaatagcttatatactctatactcagcactaggggcctttaattaggctcccttttagtaagtttatcttacagacttagagtagttccgatttctatatatagcttttaatataatagcgaagatcacccgttattctaaggtatatttccagctacttatatatatacagaaaaactagtaaggttatcgcctttaccttcttagcggttattaatatatctacagagtcaatatccttacctagtagggttaaacttagaaacctaatatatactttcttcgggtctagagtaatattaaattcctctagttttacaaatagtaggtagagtttagtaatatactcgttaagtgtatcgccgaccacaaagatattattaatataggttcaatactattctcaaaacgtacggaatatattatctatctagcgttatacgtaggcgatagagtttaaattgcctatagtaataatatagagaactttttaaccgcggtataatataacagcttagtagctataatagtcggggtagatacactattaatagaagaattttaccgtatctataattataataaaacgcttaccttttactaaagtaataatctcgtcttatcctagtaataggtataggtctagaactaagttcttatttatcgggcggttattaactatagcgcgaccgacctattagagcttagcgttacccttatcgtctgtataagtgacccatttctatataataaaaatagggtttataccctaggcttagtatttagtaaacgatatctttccttaagtatatagagtatcgaatatatcgttaataacttattagctttctcttacctatctatagacttataaatactatagctttaaactagggactattaggagtcttatctattcgtcttataggatatctataacgccggggttagaccaaatgttatattacttacaaatatcgcggaatactacagctattttaggcgtcctatagattataatactattaggtagtactatttctaatagatatcccagctaagtatagactatagatattagcaggaccttctatatatccagtataaaaatagtattaggaagtctattaggaagtctatctagtaactaggataagttattaatagcagctagataggtagtaatagagttataaacatctcgattaatcaataggaggcagagctcgaccgcttagggctacgataccagaggtatcacttcagtagaaacttagtaggtagatataaagtctagctctaaaagttggcctatacaatccttcttcctaataacttatattcggtcggtattattaacagtatatatatatacaaaaccagcgttaactatctataccggaatcttaaacttactattacctagctcaaaaacgaagtcacaatccttcggtaaaatcgactttataataatagggatctataccgcctggtatagggggacctcgattttagaagaagtatagaccagtcttttacttatatagtatggttttacacagagggtaataggaaaagttaagttttcgtaagacttaataatcacctaagaacgtgggaaattaagtataaacccttctagtcttagaatatctatactgataagaagctaggtacagaggtcctcaacgatataggcctcaatttatagctctacggccgtatctttatttaggaagtaaacttaaatcacaatatagcggttagataggtattaggaaccgatcccacttataggaatcaggctgatagggtactaggggtattagaataataccgctagctttaaatcgatcaaagtcataatatatccggagttaaggtagtaagtgtttagcttactagggcttctaagtctaactgtggctgttatatatcgctaggatcgaaatatatagctagggacatagtcggtctatctagctaagtagataatataataagtaggattcacgaaattagcgatagcttcagctggtatagcggtagtagcttaaggcttacagccgttaagatactgatacagcttggtattcgacttaaaaacctataaataggataaataagtgactaagtacttactattaactatatatagctaggcctataccggcagatcggcctaggctcgaaaactagattagtaatcgtcgtcctataggctaatagggttagcgaaattcataccgtacaggtcctcgtcagtataaaagtcatcctcaaaatcctattaatcatcattattaactaggatattatcctaatactcctctaggctattatcattagcttaggagtagtcattcaactaataatagtcagtatctatatccacatggtatacctactaaggtttattctaaacagtacactgggagttcctagagctattatagccagactattagcggctaagattattctaggtctactaagcttaaactccctactatagatattattatctctaaaaggtttagggaccttagttgctttatactaggttctagggctaatactaataggactaatattaggctcctatagcttagtacaggcgctaaggagtctactaagcctagctatagggcgctagagcctattattatctatatctagcctagctttagggtagaccttaatagtcttaggctagcgagcagttatagccgtacaggcgctgagggtagccttagcgctagtcttatcggtaatatagggccgaattgtcctattgtagcctattatttctaaacctagtagttaactaactctagcgcttagttactatatctttctaatcttaatagtagtagttaaggctatttataaaagtgactaataaggtagtctcagttaactctaggatattataacgaagtataggctctaggttctagcgaatttataataactagtcaagaatatctattatacccgtagctttatataggcgtaatataccctatatatattctcttaggatacagcctcagtatatatcatcccattcgtatatatacttattaagctggagaagggccttagtatagttaggtctaaaacgccgcgttatcataaaaaaccatctatcctagagtagaacctagtttataaggcgttttttatctatggttagctcctacgaatactatcggagcgtatcgcctcgtaggcagctatagatattcgctcggataatagcttccgactttaggagtattaggtctattatacgatctacaaacgtatatatattagagtagacgcaaagattttggactatatctattctatccttaaaactcttcgaaagatcgaaaacgctaatttcggacactttctataaggtatcggtagtagttaactagcctagggaaccttactcgccctagggaccttagttaccttaaggcctacaaagagcgttagtattattccaaaggcttatctatatagctttctcgataagctctataaactatactatattaaaactgggtaatagtagggaagcagccggagttagtatatcgcctatatagctaggaccttgatttccgttattacagctaggacctagacctctgttatttaccatttttcgcaggaggtcagagagtttagcttcctacagtaggctcgatagacctactatagggctagccttactatcgtaaaaatgtgaagttaatcgtactcttaactatactaggggtcgttctagggttaggtattcaatactagcctcgtaagagtagaggtccacttagttgtcttcggcttattcggttcctagagactggacttctgcttagtcgtcttccgcttattagtcgtccggagactagacttccgcttagtcgactttagcttattagtcttccagagactagacttccgcttagtcgacttcggcttattagtcttccgaagactagacttccgcttagttgtcctatagaaggtctatatggctgtccttagcctatggtacagaattttcgtcctcggttcggaaaaacttactatcgtaactatctggccaaggactgaaacaaggctgccatcgtatagcagcgggcctatacgtatagtatataatagcagtagcttaggcagtcagtcggtccaaaatgggcgtcaaagactagggtatagaaaggtatatcacagtagtaggttaggcaatcggttggtccgatatagacgtcgaagattaaggtatagaagccggtaaactaggaggcttactcgtagttcgcttaggtcggggtctcccaagcggacacgtaggctcgcttaacagaggggttataagacttggaacggcgaggtaagacgttagacggaggaaatccttaacagccttattgagtatagacctgtcgataggccaggaaggtggaaatggatcctctgaagatagaaggatgacggaagtagatggcgaggttgagggattggcgggcctagcaggtgaaggggttaggataatgataacgcgggaaagtgtatctgcgtcgaaatcacctgactaggggcgtgcctcctagcgataattgtcgaactggattgcaagctgggtggcccgacgagtacgcttatccatggattgttatagtagcggctcggcactgtgatcgacagccttaccgtagcggcttagcactgtgatcgacagcgtggtcgaccgccgatcgtgctaggcttggtgacctctgaccttggcatataggggaacccctgaggtggtcgaacttgttaaaacaaacc

SEQ ID NO: 34 - DNA, 8559 bp, Penicillium roqueforti
gaagactggcaaatgtcgggagtttcaggaatccaaggtgacttgagtggctgaggatccgatcttcagccctgtcttttctccaggttttgctttcgatataccatgggctaccgatccttcggagtacggaggattccgtagctgaacaagattccaatttcgagcatctaaatccgtctgaagagtttgcaggtgtattaatagcatggctgacctcagacatctagattcgggcttagtcacccaagaccgggggctgtgtggtactgtgtaccagtagtacatcgtagtactgtgaatacatctaaaacagcagaagcaaagaaaccaatataattcattcatgcatatataaaattcaagaaataatatgaaagatcaggttgcaagcctcaaccccccatagatcgacatccccctttcttatcgcgcccctctcattggttcctagcgccagtgacaaaccacgctgactagaatctcgcacattcaactgatattcacgtaattgcttgctccttatttgcccagtcgattgaaaccaggtcagctgttccatatctggccacaaaatagtcgaattccctctcctacggacatattttgggcgttttatagggaaactatgttgctaaatgcctcatcggaatgctcaaagtggaacgagggggaaacatgacacatgaataggctagtttgatcttcaataggctgtttagaatatagtggccactatgccaagactttatactgcctatgttaagttgtgatcccaaagaactcgcttcccaagatccacattgaacacaatgaaaataaatattctatcgtagaaatgcaaagatggacagaaaagttgatttcttgttctaaccagctagctagttaggtactcgcgggctatgagataaataactccataaagcaagtagtaaaagcctcaaaaagcccagttatggtgaatcacgaatggttggccctaaaccctcatttttgatgtggattaccaacatccgaataatgcctcataaggtaatgaatcgcactggcatgtcattgttatacatatcccttgcacctagcagatccattagtccggtaaattgacatctaatgtctcgtttattatacaatcctagtgctataccacatccggagtctgctgtgaattaagaaagccagaatagacatttacttcatacgacattatataatatgattgacaggctcttagttattaacgcctccattaaatgcagatacaacggcactgatccgtatacgcagatcccatccagtcaaacgtcggtctagtgtaactgcatgtctgcctccgaaagtatgaactagccactcagaccgtggaagtgacgcacaatgcaggcccggggtcacgacccccgcatggtatttagggcctagacttatctgatcgcctctgaaacactgtcattatgctcaggtacacctgcatgcatatgtgcgttattttgggagatccttttagtgaaggggcaaagatatgttacattgaaatatatgttagagatggtgaatgcagaatgtgcaaggctgaagtacatgtagttcatatactaagaccatgtttatgtttattcaaagaaaatacgccatttgcttcatcttagaacgacaaatcataaacagtctctgaatactacgttttctgattcatttactatctacatagagtataaagaccttcttgtctcttgcaaaaactctcttcttttgatattcttgagtcatcttgggtcgctatatatattacctagcatacatctcagctagcattcgtttatcctacaacataggcactctttcctcaatagaaaccactccctcaaattcatctatatatattcgtctcgcacagcctccacagtgccatttcaagcagaccagctctggccgactgaaggccccttgagctagcttgcgtcctcgcatggcttctcccgatatacagtatccaactcggagaactgttcccgacgtggtttgaaagtcctgaagagtgaatatatccgaaccaacaagatcaaatgactttccctatcccttacccaaaaaccgaaaaggaggtgatgctgaatcgctgtgggtacctccaagaagcggacattcgacgtgcattgctaacacggccagctcgttccctccttcctctgttgtccagagcgccctttctgcagcgccaccccgaagacgacaaggtaattacgttccctgctagtcacattcgttcattactaactcgaatcaatagctttctcttcgatagacaactcgcagtaaggctgaagcctagtaaactgggcaatacctagagctaaccgaaacactttatgggtatgacttttctacgggctctttctagcagtcgctgattatgaccagatctcgaaagtctagctgcgagcgtacaacccccaagtcctatgccgaaggagcgaatcgcacagcttaaccaccgacgtcgagctcctgagagtaatagctggagccaacagatgatccagactttatgggtatgacttgttctaccaggctatctcaagtagtcgccgaaggtcttgaaaggctatgagctttcaaaccccagaacctacaccgaagggaaacttataaagtctggttggtctgttggttctagccattactctctagagctcgccgtgggtggttggcctgtgcgtttcgctctgctcgttatgacttgttctaccaggttatttctggtagtcgctgattatgtctagatcttgaagtacagcttgtgatgatccggtcagtcacatgggtcgagagtgtttcataaatcaatgatattgttgatctatatcaccagtcacattatatgatccagtatttgctcgagcttatctagaatttagatattcaggtctcgatcgtgtggaaattggtgacgtagtagtcaaccagtagcccatgcattatgagtcgtgtgacaggagagccctggagcagctttgatggtggatttgccgagcacaactgctacatcagctaccaatgccttacagtgtacaatgtacaactgcatcttggtgattgcatatccatgttcgacatgagtgctgagcaatgtgagactaggaattgccttggtctgggaatacaaggatgttgtatatcagtaccactagacctcacccattgccagctcgctgttgcatccagcgcaatacccactcaaccaagatgctcaagtcttgcgagacctcgagcactctggcaatcttcttttgtacatcctggagccctgaatcagggttatccacaccctccatttcagtgtcgccagccgcttcaccatccactaacccagcagtatccacaactgagatctggccattcagtccgacttcaaagcaaattgcgatttgtctgggggttggaatgaatcgggcaatttcgggactctcgttgtagttcctctggtctgtgatgagtaacatgagagcaggcgattgaccaagttgaatgcgcaatgtcacgtcgactttaacgtcgtccacggacagtggattgggactctttcctctggaaggggttgaaatttcaattccagagtcattcttgctatcatccgagctactcagaccaagcagtagattcaatctctcctcgttaggatcatcgttattcaagattatgagcccgtcgtggtcggcaaagaggtctgaagtctggacaggaggagtgcgggtatttttgggggttgcagttgaaaattcgcctgcgttggcctggtccttaggaagatggaacgtcttccgaatcaaattggctagcagggcatactgccgtaggatctaaactgggttagtggaagacgataccagacaaaaacacacataccggaaggatatctgcgagctgtcgggggtgcgagaagggtaggtcatggatggtgcaaccagtaatggactcaaaggattggaaagtgtagttatgttgtttcgtatacggcttgccctttgaatcaacagcatgtactgacatccggcgctttctacggccaatttgaggggatgaaaccggcgacgtcaaatgcgaagattctgataccaacaacgcatcgtatgtgatcatcttaaactcttgtggtagctgcatgccgagctgacgataaatctcggaggctgcaagaataggaacgtcgagtgcaggctcaagtttaccgacgaatcggcgattgggtgatgatgactccagcatgctagagtctaatgccatagggtcatggttgccatgggttaaccgcgtggtctgcggaggatcaagccagttcacagacccagcggcaccatttgatggaagcaattcggtgctttcacctgcagtaaaaacttcacttccaacccattcctttgaaattcgcagtgacggatacccctcttcgcattcaatcatgaccgcccatgatctgccttgatcatccaactcgccctttgaaccttgatcatgttgcgggtcaatctccatggcgtccgaagacggtaggctctgcttcgcatccaggactttggcttgctcaacccaatattctaagccaagtccgattcgggtccccttatgcatggtgggacgtccgagcacacctgtgcaaaggtgctgatactcgccgccgtgcttcccattcttgctttcttccacccagatccgcctgaagttctcttcaagattctccaaggcctcaaagcaatttacctcctggctgagtttgtcaagctttgcaagccattgtaggttttcatggaactcgtggagtgacctccatttcccacattcggcgtcttccgcggactgggcgagggtacgtttcaagaccgctgtagcttcctcccgccgcacaccttcggtgtattcaggcgtggcatatcgtagactcacatccttgacaacatcctggccagcgtagaaatcaatctcaagatcgacaaagttaccggcgatgttgagattatcgtcttgccaaatggactcgaaatcttccagtcgactcagccgttctacactttcacgtgaaacccctctaccagagactcgggcccgtagaagctgaacgacctgctcgacgcgatgtctctgctcttcgtcgttgtcgcgcgtgactccgagcttgagtccctgcattgagagggtttgaatgtcgctgtcattcatgcccgaaccaacaagaccatcgtgcactgccggtgaaggactgatgccagtatacccaccgagcgccaagagagccgaaggcgagctaaaattgacaggatcgtcgacaccggggacggcgagaggggtagcgtattgatgggacgagacactcgtgtgatgcgcatgcgcaggtcctgagcctgttggtgttctcattgaaggcgatttatgggcgagggatcgggctagaggagcggaggatggatggggagaggtgaggtgagttggcgttgcgccaggtttggccgagggagtcgccatgataaaaggagaggattgacagatgaaagtgtcaacagtcaattacttatagtcaaatccgtccgaaaaatgggtatcataaggtatcgaagcacagaacgcaaggaaggcgggtatgtttgtatgcgactcaattctcactggcgcaagtgccaatttggcgggtgcacaagggaagaactgtcgaatgattgtacagatcaagtctcatgacgcatcgaagctacctcgttcccatgaacactgcaattaactaacgcgattggtttcgagaagccaaacagatagctccgtagaaagacacaatcacgtgcgtttgcattgtttgcatctttgtattcatctccgccttcgaaatcaggtcaactattgaaatgtaaatgaaacaaacataccaagccatgaggaccgggagattgggcactggcacggaatagatattcaacactgccaagtctcccaactccactagcaactattcaacccctctgccctctgcaggactcgcactgcatggaagcagaatttgctcggtcaaataaaacagaggatctccaccttgggagcataccaaaaatggatgatggttctctcaccagtgatcccgtacgtgcatcgttcttcaaagtgaacgttctaacactctgatagccctcgaagtgggactttgtcaactacattccctatattctctcatccaatatcgaaatacgattcgctgactccatgagaccgtatgaacggttgcaaaatcctggagatcaactcatcgactatattgaaggtcggacctgttattcagatggcagaagtggagaccctttttcttgtgagggaacggacgtcagtccccgtccctgaagtcttcaatgcttacacaattgccgattacggattcattttaatgtcgaaaattccaggactctctctaacacaatgctgggaaaatttgactggagattccaagacttctattgtccgacaacttgaaagctttatcctggagtggcgccagattgaaggacctctctttgggtccattgatggtggtccatgcgaagatgttctcttcaagtatccatgggatgcagaatatcggtactacggacccttcttaacaagaaaggaattcaatcaagggtggttgaggctctccgttacgccagacccaatgcgcagctcacaaaaagagatgagcctctagtggagagaattcttgtatcgcatagccaggatgagaggaaggtactcacgcatggtaatttgcaccaaagccatattattgtgaacggtgatatcatcaccggaatcatagactggagcgcagctggctacagcatatcggcaagggaatatttctgtttacagtggcaagcattggacctagaatggaggaaacttatacccactatactcgaaaccgacgagtatgaattttggaatgaagtcaatcaatccatggtagtttatactaggatctgagctaaatgcaacatgctggattcattttagagtcgtccagttgacacctccgttgcctgaatagcttgtgccggcttcccaaccatccccttccagaagtggtatgtgccagacgggactagctcttcaatctccagtgacagcaggatgtcataaacccaatcctggcatctcttctttccatcccttggtgcaggcgaagatttgataacttggatggcctgttgacgttgctgttcactaagctcgccaagtttgacctcgccaatggcatccatggtgcgcaggccggtacccattctcgattcgaattgaaaccagggtctgtcgatgtcgatcacctccacgtggaataggtcgctaatagggcttgagggcttatgcatcgtaaatccccaatgagaccggtgctggggatcttcgcctgccccggatatctctatagacagcacatacaccatgattcggtagtcctgggcatacaattagcctggtgtctcgacaagtcgaagggtaatcaaatacctgaattctgttccgaattcttcgttttttggagaccttggggatatgttgtttccctgcgggaatgaaaccgctattacgaaatcccccaaagagaaaaagaccctaaaataatcataacgattgtgcgcccgccttgtttcacacgtgtgcaattgggatttcgttcatgctcggcgaaccatatcttgagtccaaagcgcctgcgcattagagcggtgtaacagaatgtgttctggaagggaagtacgatttgactggctagtatgaccctccatcgagataccagtatcgtggcatatgtacgcagccatcaaaggatacgcacattcttcgttcatttcgtagcctccaaagcttcgggatagattaggtctcctacactgtttggctattcgatgagaatattaggaatggtcacagaaaagtagaatctatctgagaagctatctgaggatcagtcagttaaatagtaactagcgtaatcggtaagccgcccatatatgcaatacagacatctgccatgttgaatgtgttctagccagcttcaggcttgactctgtgctgcttcgtttgtagagacaaaaggcaatggtagttttggctacctgaggtctctagactctgatgctccacctaccccaccatacagccgatgtcatattggtgggggaggcgggatctaccctcaaaaatggccgaagcttttgtttagccagagtggcgcgctttccgcttttacaagtcgcatgaccggaaggtacgaccgggaaggaacatgttagacacctgcagccaaaggttaaatgcctgaatttgaagggttgatgtctgaatacagaccgctttcgacaccgctctattctgttaaacaaactggatcttctccaagtgcccggacaagccgaacagttgatgaaaggagttcgcgtcgaccgggggtagtgtaagcccagtgatacagtgcaacgaggcgtgtgcaagcacagagaccaagtcgcgaggtccaaatattagaataatcatgacgtt

SEQ ID NO: 35 - DNA, 7395 bp, Penicillium roqueforti
taggataaatactattattttttatccctaatatagttagattatataactaattaggctagtttttctatagaaaaactaacttagaaggctttccgcccaaaaaactagtcctacagtttttcgcctaaaaaatatcctttcttttattttatttattttaattactaagttatctattagattattatgttttaggactattattagttttagagagttagagaattgattaagatttttctgccatatgaacattcgccttaccaccgttttttgtcaaataactctacgtctatagtcggataggttaccttattaaagctattcttctattacacagatacactgtgataattaaggctactacggcggagaagcagtatctcctttaagtggaagtagacaattattataaccttaggagcttacagggataatagatccctgtctaccttaggacctttataccctatgttatatattagtactatggcaaattaatggcgcagatgatgatactaagctggtctagaacgcggctttagtatattattaacaataaaaattctagcttctttcactgggagcgcgacaaagctctagctgtactccggtcgcacagagttgtccacagcgatagtaagtggcgtaatatgctataggatgacctagatggccgtttgtttatcattgacttagaggatgtgaaatggctaaagtgtcctcgaactctagaaccaacctctggcaacacgcagcatggtcatcgcgtcggggcggggaaaagcaaacaaaggctcctatttagctcaactgccgtctgcacatgacatcagttaacgttggcgtctgtaccttcagatcacgtcatatgcccgtgaggcctagggcataatgaaatatagtgttgattcagctggcgtcttggttttgctaggagattcaaaggccgaaggccgaacaaggctatcaaagctttgggagtcatccgcgaagatcttcggcgtgtcaatgtcctttggaatgaaaagctcgggcgggcattaattagcgactttcaccactctaggttgaaatgtccgccagctcctaagcgatcacgatcaaagagacaacgtttgcgaacagagtcagaagatacaaagcgtttacgtgatactacagcctacagccctggagcacacaagtccggaatccgattcggcttatgaaggcacggttcacatgaagaaatatttgatatataacagagtgggcgatagtagcatcgggaataggcaccgtggcgaataggtagcggcgtgacgccagcgctacgacacctacagatggaaaaaggaaagactggttttgacattacttatttcaggaatgggtcacaatggcagcgagagagcagggcatcggcggaacccattttctttgcatcacggccggttcaggctatatctggtcctccaaatctagcttcttatgtcatcataataaggattggccacttgaggtggttctgatttgactcggatattgctccgaacccagaaacacaacaccagagaccataagcggagtaccactgtctggagtatgacaacgatcatgcaagatactagactgatactagactatagatgccctagataagtcgctctcaacgtcaatctcgcagaaccatggatcagctaagattttcgcaggcgaaggtctcttcgcgggatcatattgcaaaatccatcgaatgagtgccttcactttgtgggcttcctcctcatcaagatccaggcctgtccgatcgaatgactcttccatagatgtctgctccaccataagcggttcctcccccggagcgactcctccaagctggcaattaaagagcttcctctcgggcgtaaagtagagagacgaggtcgtccaatgcttatataactcgtcggggagggcgccgagctgggcggtgagggagagaagatgatcgtcatcttccatctcggaagatagtatacagaagagtggctgtccggtgataagctcaaagacaaggtaaccgaaactccagatatcaacggtattatcgacggctccggtaagaataaactcgggagctcgaagaccgagtggagtaacaggctttgctggcgggtcggtaaagaaatatactatccaaggcagtcaggtatgagtatagatattcgtcaagaaaaagggacagataatcgaaacgggagggactgaccaccgcccatatcggataatttgaccttaaacccctcggcgtagcaggtaaagggcactagtggctgcgcaacgcaaagatatcgaggagcccatccatcttatttaccgtctagcctctgcacaggaggcgagatcgaccgggattgcacatcttcctcttgccggagtaagtcctcaggcgtcgagtcgatatcgttaagagtaaagagtatatttcccggctagaagtctccataggcgataccattttcgtggagaaatacaagggcctgcaaggattgcttgaggatgctctttgccatctgaagcggatagcgaatcttcattcctcgcctacgaggtttgaactgcggcagctcctcgaccatagtattcacactcggacccataggctcaaataccaggcacttgtggacaccattgggcccgcggtactcgaactcacctagcagtcgcgtgatatatcgggtcccttctaccggtacaacttcgataatatggcgtaagattcgtagctcggttatcgatcccgagatttccgacacaaggatctttagggcgacatatccactatttcttaaaggaaatgagtaacgataatctatagcatcgtgggtagaatattcaaaagatgaccttactccaggtcacgggcgagccaaaccgttgagtaggagccctcgccaagtttccggatgaccttgaactggcggttgaagacatcgccgagaacaactggatgataaccacctgggcggtaatcttccacccactcacagggtaatgtaatagttttgaatcgcagttcgccatctattaaggcccttgatggcggagtgggaggagacgaggtactcatagctgcgctgcgttatccgagagttgccgaccggaatgtttcgtaagagatgcagaattgtaatagggaagtccgaaactttgggagaaactggatagacgttctcaaagagcgtgcagcaaggccttcggggtacatttatggtccctcgacatgcacgagtctcagaattgttacggaactcgcgccatggcgcgtactatttttattcattgtggtgtgatatgactaagcaacctgagctgttattattggcctaaatggcggtccggtgtcaacgtcaaccgtagtgtcacgccgccaagtacccaagttactgaattagcaaccaatgcggacggagtaccagcgtagaactgatccttgtgcgccttcctgaaacctggtcacgtatagctagtgcgttacaataggcgccctgcccttggaatgattctaagtggttgttcgataatgtacttaccgaaggagcgagcacgttaggtggatagttagtcgtggccggccacattaagtttcaacaggggccagcgcttatgcacctcaatcaccaaaacaaagtccatgaatcgaagaccgagatgagtgactagacggtcattgtctagctgggctctgatgtgagcaaggaatataagttgacttgagttcgccatggctcaattgtattcaaacaccaactgcctgtgccaagaaccgtatttttctgagctcattttccatcttagtttctcaaagatagcgcaactcttggtttatcatggataccagcaatgttactttcgacccgcccaacatatactcgaacaatccccaggagaagacgaggattatcaacttggtcattagccaagcacctgccgggactgcgagtgccatagtcgtgtaagttagtcgcatccctcattacaaccaagccgctgacgagagattttaggaacggctggcacaccagcagaagcgacaaacagcggcactgtaccgtcgattaccacgacaccgctggtagctggatcagccgagagcacattatctgacttggctgggacaggagagggttcctggtacctgtagctttagattctctggggacggaagtttgttgaacagccgatgcctagaccgacctagcaggactagacagtccagtaagatccggattcagatatatgtatacagagagcagcaacctattttccctcttttttcttttctttttttttttggctcacggtagtattgataattcaaaaagtagcatgggtagagaataggtgaaaacgaaaaacgcccacaacgatggatataaaatattctgctcctcgactgataactagctgtgactgaaagcatagatgtgataagccagtgccccttgatcttacctttgtaataaagatcgagaaagcagtgtaatatggctactgtaactggtgattcttgattctctaggtagtcgtgctgtgataaccaacggcatggcggaggaatatcatcaaatcaatataattacttttcaaggagcgattgacagtgagctggggcatcatgcacgaagaagtatcgcttgaaaacaaaacgggggagtaatggactaggagctaatgtgtgattggttcccgactactccttgctctatcttggagaagctctaggctacgcgatccacttagaccagactacttggtcttctcaaactattaatgttccaaagaccgtggtgatatattagatcttcggaattcgtatccagagaaggaaaagtgactctttttgccattaaatctgaactaacttctctggcaatgtccggtgtgaccgttaggcggaaatcttgtcgatactggtttagctcaaattctgtcttgttcgtatctttcaatcactaggcggagggatatatattctaaatctaggactactatatgatttgcctaagtttgtggcaatgggctgctttgtggatgaacgatcgcatgttctgctactgattagtaaatctggaattgacttaaagtatagtgaatcatcggccaacacttaaacccttaaaacgactttcttgagctttctccttaagatttctgatttctagttcctaactatagcaatctttcttaaaatacattttattctctatactgttgtaattttgatacgggttaggattgtgtataaagataaagctattgtctaatgcccgaaaagaaaaaggagataagaaagtaggctgatgcgtatattgacagattagtgagtaaaggtaaatgaaacgatagaacactgcggcgactaaggatcagtaagaagtaaagggccgggcaaatgatatctaattgacgtttaggaagccctgcctaaatgctaacggattttgtgtggtaaatggctcccttgccgctctttcctacttagtgagctctcttttctaacatccgctttcctgtacccacgaaccctccctctttagttggctcgctgcctcctttactctcgtaacccagtcctttataccgttgacagtatcaataggcgagttcttcctctctagtaggaataataaaaccttagtaggactgaaaacttggtctggtaccttggaagcaaagttctcggcaagcctgtcgattgtctcatcgccgaatcgttcttcaggttgcttgaagtccagcgtccgcttgaagactatgtgaaaaagctgagtagaagtggtttcatcggtaagcttgaaatgcaccttcttgtccgtgcggctaggccgaatgagtgcttcgtctaaatgttcgatgtgatttgttgttatgataagaacccgaccctcttaggataagataccattacgaatattaagaaggctagatagggtgactctagtactttgcttgttctcttagtctatatcagtgttttccctgcgccctataccagcagcatctacatcttctaggagaacgatacagtgaggcggaagcttagtaaatagtgccattaacttgctattagaaatgcctaacaattaaagcgtataaatatctagttcaaattcccctgctagtgagagactgaaactggattttcctataccaggaggaccatatagaagatagcctcgttagtaggggataccgcggtcggcgtactaccgctgtgtatctttattaaggaagtcctttatatcccctaaaaggtcatcctatacctgcttgtctataataactgttaagataggttggattggtctcaacctggttttcttctactccccttcgcggtgcttaaatacagtgatcttcttatcaatgttattaaggtatttcccttagtattctttaataagttctttaagaatattcgggtaaagactaatagaggaaatacgaatatcttctcggtagtccttgactgtatagtgaaggataagcaaatgtcccttatactagaaaggaaaagacctatcctatagagaaaaggttaaggctttttttcttccgcgaagttaggtagtcgctcgctatagagatctcacgcgagcgatcaaagtataggcattgtagacgaagggttagtgagctatccaatcgacgagcatatcgtacgcctcgtcataatacgagacatgaatcgtcgaagctatagattgtcagacccttccaatcataacgggtggctcacaaactgaagtagtttctcactagctcctatatatagcggatagtatagcgagtgaaaagggcaaaagctcccagggtacagaatattcgagtgtagctatctaggttaccagtaagcagctactatatggaggtagagaccatactgagaccggggaagaggatatctataagagacatctagcgagggctattgattagataaaaagaaccttcgttaatagtgcccatttcacatgagtctcgaagaatactggtgattagataatcaaatgtggaaggcaataagtagagaggtgttttagaggctggctactgcgaatataattgcttagggttccaagctcccttttattatttatatccaagatattagacttttgtctctgggcactgggctacctcactggttctttgtattagatactagttctataaactcggcgtttagctcaaggtaaatgtgctgctgtatgatgtatattgtccagctaatttcgagtgatataggagaagtctgaataatttaataattgttttatttaaagctataacggataaaggtctgtataagagggaaacatatgtaaacctatataggcttaggaaggaatatctatattatta

SEQ ID NO: 36 - DNA, 4874 bp, Penicillium roqueforti
actccgcgatgagatacataaggaagaactactaaaagcctaagcagagtttggtgccgctctcgccgaggtccgacacaagctacagaacctgactgatagacccttgacactgcaatgccactccgaggtatactctcagaacaaccataatacaattctccgcgagattcaatccttacgcgaagaaatcagcgtccccgctcccacaagttccccatcctatacagatatcgcgcgcactcctccaaccagttacccaagcaacatacggacactgtcaacgctaggtataacaccgaccgcctttaccgaaactttgtactatacgatagacacctcgaagataactaaaaatgaaaatgaaaagatatccgcgggctcaatcagggccacaatcgagaaagagatccaaacgatagataatcacacccactagcgctaccgcgcggtcactataagtccaagagaccccaatcggatcaggattacatattgtaataaagccgagtaccagctagtcaagaaagtagcagaagaaaagatcagaacaggatcccaggtgctccgagacgagctctacccgattaaggtcgacagcgttaagaggactgcggtgctagataacaaccataccattctagctagagcagccgtagcactaagtgaagaaaacgaaagtacagtcgctaagatgatatagcttagcagcaaggaagccgcgaagctatatagctcaatggtcgtgtacctcactaaaggctccaacacgcggaagctcctagccgatagatacttccacattagaggggagtccgggacaactagcgtctttaaatatcggccataaccgatacaatattataactatcaggagattggtcacaaggcattccaataccggaagacctagaagtacacaaagtacacctcggagggtcatcaccacagtcactgcaatcaagaggttctaaagtatattccatacagtaggccacatgagtcatttagtaaaaattaccagaagctctacccaccatatcataaataaaatacttcgaataatccaattaaatgtaaggaagcagggtactgtacataaaagcttaataaacgacaaataaactaaggatacagtggcattagcaattcaggaaccccaggcgaggaggatttagggacaattcttaaccaccctaataggacatcataaatagacaaagatagtaccctcctcctagagggaaggcagataggcgatccggagcatactttagattaataaagatatagaagcggagtaagtagccattgagtccctagatctaatagcagcggtcatccgactacccgaacggctgatctttatagcatcagtctatatcgaagggagagattccttagctctatataacgcgtatagttacctaagaaaggcaattgcgatagtacagcaagacataggcgcggtggtgaacatcatgattataggagattttaaccgctataatcaactctagggcggagataaggtatccttaggaagacaaggtaaagcggatctaatcattaaccttataagtgaatttactctaagtaacttacttaaacgaggcacaaaaacatggcatagcgaaggatagtatagggactgcgagtctacaattgatctcgtcctagcctccgacaatttagtagacctaataaccaaatgtataatacacgggactgagcacagctcagattaccggacaattaagacagtattcgatacaccgtagccagccctaaaacatcaggaacgacttcttctaaagaatgcgccatagaaagagattaatactagaattacgaggactctagctaccactctatcagaaggtacagtacagcagaaaaccgaccgactgatatccgcagtcttagacacagtgtatacattaactctaagagcgagaccatcgctatacgcgaagcggtggtagataaccgacctaacataactccgttacatatatacgtactagtgcaatcgcgcttacttagaacgacggacagggtgtaaagtaccttagcttaaaaagatagcccaggatacagcaaaacaatatcatgataccatccataagtaaaagaagaagcattagaataagtttctcgcagataacgacaatatctagaaagccgccaagtacctgaagtctagggacaatacagtgtttaggaaactaccacagctcatcagagcagataggactactactactgaccataaggagtaagcagaagagctattatccaagttcttcccccctctgccagaggggattgaagataaggggacaagaccacagagagaaccagtaaggatacctacggttagcatagaagagatcgaaagacagctttttgctacaaaatcatagaaggcacccagcgaagatagtctaccggcgatagtctagaagataatatggccgactgtctagcatagggttctcaatctattccaggcatcactaagagaaggcgcgttaccgacacaatagagatacacaaagatcataccgctcaagaagccgaataaagaaaattatactattacaaaggcgtagaggccgatctcactcctagtaatactaggaaagatactcaaatcagtagttactaaaagaatcttacacacagtggaaacgtatagattactcccgaccagccacttcggcgcctaaaagcagcgatctgtagagtaagcgcttatgcttcttcaagagcagatctacgcagcatagcgtggccgacgagtattaagcttaatcagcttcaatgtaaaaggtacctacaacggagtatacaaagaacgactgctccagaggatgaaagcgcgaggcataccagatgacttactccggtaggtcgaggcattctactcagagcgaatagccaccatctagatcaacgggcagctttctaaggcccgaagattaccccaagctggcctaccttaaggctcacccctatctctaatcctattccttttctttaacacagacctcgtacaaagacagattgacagctaaagaggagcggtcgcttttatagatgattttaccacataggtgaccaggccaaccgcgcagagtaaccagcaaggaatcgaggcaattatcaataaggcgcttaattaggaaaggagaagtggagcaacttttaaagcagaaaagacagctatcatatactttgctcccaagatatgtaaatcggaccataagtcgtttatcatcaaggaacagacagttgtgcccaaagagcatatcaagatcctaggtatcttgatagacacgagactgaaatacaaggaacatatagcgagggccgcgtctaagggcctagaggcagcgatagagcttcggcgacttcgcggcctttccctagcaacagcgcggcagttatttacattaacggtagcgccagttatagactacgcctctaatgtctagatacacgcgtataaggacaaggccatagggccgatcaatcaaatccaaagagttagagcataagccattatagggacattcctcaccgtcgtaactagcgtagcggagacagaggcccacattaccaccgcgcggaaccgattctagagacaggccgtaaaaatgtggacggatatatatacccttcctaaaacaaacccgctccgcagaggtacagaccagatcagaaagttcagacaatatcatcgctcaccgctgtactaagtagcagatacacttaggcacatcgatatagagacactggaaacaattgacccgttcacattagccctataggacgaacgcgtatagaccaatactaacggacaacatgaaccctagactaaagcgggcgggttgatacagatcgcggtcagcagctcagcacagaacgagctagtaggatttggagtcacaatcgagaaacagccacctcgaaatcgaaaattaaagctcaaaacgttttccatcacattaggcgcgagggcaaagcagaacccgttctctgcagagctagcagccatggcacatatattgaaaatgatagtaggaatcaaggactacaggactacgttactcacaagcaataaggcggcggtgctcacactaagaaacccccgacgacagtctagctaggagtttgtttatcagatatacaagttgataagaaggttgcggaagaacggaaaccgcatcgagttccactagatccctactaccgaagacaataagctgttaggtctagctaaagaataggccagaactacaacataagaagatactctcctataagaacacgtctcgaggataaagtcgataacattgaacatcgcacggtcctaagcagtccccagcagtgagctaccagagaacataggaagacacacaaaacgagtagatgccgcactaccaggcaaacacacccggcagttatatgatcgcctaacatggaaagaagcgagcgtactggcccagctccgaaccggcatggctaggctcaataggtatctcaatcaaattaatatagcagagacggatcaatgcgattacagacaagcaagagagactgtggagcacttccttttccgatatcggaagtggatgacgcaccggacggaaatgttacaatgcacgcagactcaccgaggaaacatatctttcttcctaggcggaaaacagccttctgatgatcagaagcggacgccaaacctagaggcagtacaggcctccatacgtttcgccattgcgacgggccgacttgaggccacttaaacatatcgaccaacacaacccccaccccttcttccgaccctacttacccaccacctcgtgcta

SEQ ID NO: 37 - DNA, 4855 bp, Penicillium roqueforti
cgtacccagcctagtgggttgtggtttagaatccaactcttttggcgatatacaggctacaacaactatatatatccgtgtacgtacacgtagagtgatccacttcctgaaaacgaacttagagcctcgtcgaggcctatcgtggcctagttgccgcttgcgttgttaggctgcccttatggcgcgcgactttgaaaccgctgtgacgcctcagcgaagtccaacacggcattcaccgttttggttcgcgagacggtgtctggtttacctctctcaccttctttagagcctcccagcagactcgatacgttgctaaacgcgtccccaaccttcattcttaattctcttctcaactcccgtagttttggacagtccactaggacgtaagtgactgtttttttgcacgccgcacgcgcagtgatcgtcgtcacggaagccaatagcattcctaaaggtagataaccaattatagcctgtgcgcagctgtgtcagcaggtatgcccggcccctgggcaggtttccataaagcttcctagtgtaggccgccgggagagtgctatcgattttccgcaggtgaccgcctttggtggacgattcccattcccgttcccactgtgcgcggatgttgtcgcgaatgagcgccttcgtccttgtcagcaaagggcggaaggggtgtgtcttgcccgggcttgctgcgtccttggctagccgatctactgcgtcgtttcccgggttgtcgcagtgtccgggtatccattggagacggagcgcaattccctttgcttgaacctccgtggccgcttggaggatcgcgtggatgatgcattgtcctgatttgtttcctgggttctggattgcttgcaatgctgatctgctgtcgcagaggatcgttgcggtcgtttttcccttatgttccgttcttggccgctgattgctgatcttgaacactatgctgacggcgtagaagatgcctatcagctctgctacgtgaaccgaccaccggtccatcggtcccacctggatctgctgggattcgatggcctctaggttattatcgagtgcaacgacagcagcgcctaagtggccttcacgtcccgaagcatcagaatagatcacgatggtaggtgtggaccgaacagccccagcccgttctcttgccgtctctcggtctgacccgatatcaatccccgtgaaggactcggttcgccacagtggtagcggtcgtgggtcaatcgtctccaattcatccagactcactgggttcatggtcttcagggcttccgccagtgaaaaacgagcgtacgacctgatgttatccctacgtttctgagctcgccgtagtatgtcccaaatggggtgatctcgcggtagtgtggaggcttgcgatggtaatctgcgctcggtggcggaggcgcaggtgcgttggcagaacgtgtgcttctacttccagggttgtagtagctaccgtcctgaaagtcgataagatgcggatcaacgtggtcctctggactgtgttcaggtgtcgcaagtgagtcttgtctcgcaaagggtcgtaccagatcgtcgacgcgtagtctacgaccggtgtgacacaggcttggtagagctgtcgcatctgttctgggcgtaaatgccgcagcccgcccagagcaatactgaccttgatggcgcgtttgatcgcttgttggacgtgttctttccagcgtaactcctggtcgaaaaccacgcctagcagcttggccgtgggcgacgcttcgactgtcttcccgttcataaccacttgaccctggagctgttggcttcttttcctggtgatatgaatgagctcggttttctcggctgcgaagcaggacccggtttgacgggcccatgctttaatgcgggggctgtcttccgattgaatcttggctaggttgtcttcggccgagcgccctactctccagcggaagtagtcatcgatgaaggcggatgcaccgccgtgaaaagtgacgggttggtcgactagatcagagttgaagaatgcgaacaggataggcgagaggggtgagccctgtgctagtcccgcattcgctagcggcgtgacctcggtgcggaagtcatcaaatcctatgctagcgtggcggtcgctcatgaagctcgcgatccattttctagccacggttgggattctccttgcccggaggcaggcgtctaggctcaccttgttgactccgttgaaggcacctttcaggtcaaatgccaccagcgttaccactttgtgtttgtaccacgctcggtcgatcgcgttagagaggaccagaagggcctgttcggtggttctgcctggtcgccctccaaactgggtgtccggtagcagaccgtgtttttcggcgagatacgacagtcgtcgcgccatcaccgcctccagaagtttacctagtgtgttaaggagtgagatcgggcgataggccccggggaccgagtaatctggtttcttaggtttctgtagcaccacactctttgcgctccgccatcccttctggtggtatcctaggctaatggacgcggtgaatattcctgtgatatagtgtttgaggtatccccacagctgtttccacacgagtgtcggtacgccgtcttcgccaggtgcggtagatcctttcgccgatttgagtgatctctggatctctagctcggtgatgggttgccacgggagttctagaggtgctcggatgagcgaatcttcgtccggttcgtccattttcgggaagaaagcatctaggaaagcctgcgccttttccttgttttcggtgagctcgttggtggcaacgtgcaaggctgggatgcacccccaggcctcacgcggtttcgtatagatagccgctttccagagcttcccttccccggcttcgtctaggaattgtttccagtgagacgctttaactttctcgatagtccgagtccatattcgtcgtttctgttgcatctcttgaaagagggtcgtggagcgggcgtcgtgtcgcccgagctccgcacagctctcttgccacttccggcgtaggtagttgacctcggtttgttgtattttaaggtctggggtaaaccagcgtttagagtatggtgatggtcgtaggtcgggagtgtatctatccaccgccgtggcagtcgcctctgtgagccgctcgactacctcatctagcgctggtctcgttttcacctccttccacgggcctatctgtcgaagcacgtcttcggcgatcttggcccagtccgcgcggtcgtaggctttcttcgccttagcggcgggctggcgccgaggactcaggttccattccgagtatgttgcgcggtggtcagacccgtagttctcgtggtagagatggcacttgatgagcagttctggtcggttcgtgaccgtctggtcgatagtggtgctcttccctggatcgttgaggggccagaatgtcgctgtccctcgtggcagacagccgtgtaagccatgcgtttggaagaagttgatcaattcgctcgcatcttcaataaattgcggttgaatgtggttggtgctccacgccgggtggtggcggttgaaatcacccgagaggatgacggttgttatcctttgatcctcctggatattggatgttattgtgttctggatcgccgtgagtgctagttctgctgacgcctcgttgggcgtgaaaagcgggacgcatgagaggtagaccgaaaagataagaaattgagagtcggctgtccagattttgatggctgtgacgtccgggtggtcgcaggcgatctgtcggtgggaggaggttgagactttccggttgatatagatcaggctgcgaaatcgacctgcatcagtctcggtgatcggtcggtaaagtcgccaggcgctgtggttgacgtgtgtttgataagtggtgatagacggttcttggatcaggagtacatccagatcttggctctggtggtcgttgataagcgcttccatcctaggccccgatttcatgatgtttaactgtagtatgcataggtttgcccctaacattgggagctaaaggttgccggcgttaggcactggcggtcactggttgggtgatcaccaccgcagtcgaggcatcgggctctcacccccggggggcaccgttcccgttcgtgttggccagcgcaatgtccacatcgaggcgtttccttgcacgaccatgcgaagtgtccaaatcgttggcaccggaagcatctctttctttttagttcgcagcgttccacactgccgatgaatctctggccaacgataaagccattttctagtataaaatcggtcccttccgcggtgtcgaaccagatgccgagggatgcgaacttccccagcgccttatccttcttcttaagccacgcgatctcttcgatctggaatcctcgcccggtaagttcattctcttccatgattttctcgatcgcctgtgcgtttgcgttttctaggtcaaagtcatctgtcggggtccggtgtaccacgacgccgaaccgtagcttgaccagtttcgtgttgtttcctaactcgttcagccattcgctattattgcgggccgcttccgccgactctgggtctttgaaccggatcacgtatcaggttttcgtggtgccaaccccggccacttgggcatcttgtgtggacggtgtgctcaacagcgccgtacggatgtgggtgttcgcggtctccgttgggagatatcgcccaaagttgttttgatcgctcatatcgttgtccctcgggtcgacaaaggaccgctgagtgctgattcggacgcagttccgatccttgtctatgtgttggtggtttggttgaagaggcgggggggttgctgcccccgcg

SEQ ID NO: 38 - DNA, 4627 bp, Penicillium roqueforti
gcgggggagggccgccgtcatcagccctcatccgccctcatttacataaaattttgcgacctttcctaactgagctgtataattctgctgattcaccctcatagattaccgtttttgaacagtgtttttgttttaatagtaggtttactagatattttcatacatgcgcttagagattcgagggaattcacttctattttgatgaaccatagcaggtgatagtataattacagaattatcatatgttgagatgtagtggtagtttattgttatagaaatctataattctgtagtctcagtatcaagaaatatatattcatcatgtaggcaggtgatgcataaactacatctaacaaccaccatattaattcttgacgttcccctcttagtaggttcattatattaatactagtagatattaggcttcttactattgttctatataatgaaagggctttatggctttataagagatgagtatgactttgacgtttaaaatatgaaagcattctggttgatttcacactaggttcgggggcatttgactcagcgaaaaaacgagggccgatctccgatttgagggcggcccgcataattcgagggctcattcgagggccgccctcgaccagccctcggaattgaaccaatcaggagaggatccctataataaatgggtcgcaatgtgatacattacattgatagagagagtaggcctaatttgaaaggaacattgaatctgtttgttagcacaggtggactttttagtacaaagtaggtctcatccaaccctctaagtcctatctatcttctagatctacgcagtacgaaggaccattcaattaacaatgtcccagttatctctattctcggatgcctacccatcatctctttacgaaggggatacaattgacggtctctcctttccgaacgaccaattccataatcctgatctctcaggaagccagcaaacaagtgactcagtatcgaatcccgggtttcttacgccgattcctcccccttcggtacctccttcactcgagcgcgttggccctggtcgatccattgaattcgttctatactctgatatgtcaaaggatgaatttgtcgcttggtggttagaaactgaatttggacgcaggaaacggctccattggagtggcaaccgtacagcagcttgctggcagcacttcgatcaagttgctaatgcaaagactggaaaatcaggcgcgaaatgccgtcaatgccataaagtcctagaccatccagcgaatgggcgatatggaacaactgcacttcatcggcatttagctggaccaacctgtcgtaaatccaccagacaaaagaccaatatcaatggtttacttataaatgcggtatgtttaagccagggttccgaggtttcgttttagggatttactaatgattctcttcattcaaaggcccaaaacgcaccagctaccccgactccctttacgcaagaagcatgggaacataaactgttgaaattgctttccctttcacgcctccccttccgattcatcgagcatgccgaatttcatgacgttatcgcatatgccagacttgccccagcacaaccccagattccatctgcgaaaacaatgcggtctcgactgcgggggtacgtccaagagcagcaacagtctatactaaagcagcttccgcctggtgtaaagctttcgcttgcattagactgctggacatctccatttggacaggcctttatggcagtgactggctactttcttgatcagcactgggaacaccgagagatccttcttggattccaacctttgtctggttcacatacaggtgtaaacctaagtgaggtggtatcgcgcatttgacatgcggaaagagtaaccggcacttttcccaattttcatattcacctgtcggaaattcctggcacagactgccaataaacttctccttccattgctctacttgtcgatgagattccaaccacatacgcataatcagttgcaccagccgatgcatcgtgaagattgttgtatcctcgccgacagttatgaatgaataagcactgagaatcgtgatatcatcttcaaaatcggagtctatatctgatacagatatctccccatcgtcactagagtcgtctgaaagctttgaacccgtatcaggattgcgattggtttcacctcgagcccagagaaggctctcgggaatcccttgccgatcaaaaaaactcatgagagaaagcaagtccgctgcggatggttttgttcgttggatataatcgaacgatatttgccatgtgaccagaatcgaattgcttgcttcccagtcccggcggtataagtgactcgcctccatttccagaagccttctcactttaaggtcattctttcggaagtcccttaagtactgcgaaacagaacagcgaggggctcgatttctaatgtagcttgccgcctgtacgatcgctagcggcataaactcgagctcttctactaactgtcggctttcttggctttcctctggttgtgcaagttttctctggagaaggtccagcgcctgggacctttccatcggttgaacttcaatgaggtccttgtgatcgaccattttcaacgcaacctctctggtccgactcgtgataatggtagagccattcccgcttcgaggaacatattctaatagtggttttgtcgaggcgttcgttaggccacttatcggatctcccttgcctgccgccggaaccgagcaaagaagctgatcgtcatcgacattatcaaggatacaaacccatttccctatcttctcatcccggagccagttttcgaccaggtttaatatgttaactttaggatcttgacgacccgggattttaacctggtccgcgatgctccggaaactttgatcgaatcgggctgcgttactcgcatggacccagaaaacccaggtggccggtgattcggatcggacctggtaggagtattcgatggcaagttgcgatttccttcgaattgtgagcaattaagcaataaaccacgggccggtcgctctacactcacccgacaccgccgaggccaacaagtgctatcctcgaccctgggactaagcttttctcgtggatccgacgaagcagtgcatcgcgactgacaaagtccaggtcgcgcgcgaatgggacggtcgagaacgggttggttggagtttccggtcgctctaggcagggtgggaagtggcggttagttagtcgaccctggtcgtgtccggttcccagctcacctggaggcatattgatctgaccactgttaaatccaatctggagaccagagttgctgccatggaatgatgtcgacgccttgataaaatatctgtaggtccttcgtatttttgtgaagagttctttgtctgactcccagctgaaggaggggcacgtcctcagccctgaagtccaccatcaggtgacttcacggcgttaggactgggaattggattggcggacagcccacatcgagcattctgttgatcccatgtggggtaggattacgatcttcccaggaatcggattgaccacacaatgacacctatcgctcgggcgccttaaagcaagatggttgaatgtcggccgctaatacgtggcggactgctatttgcggggctataaagctaaaaatccatccacatataataggatcgcgagaaaacacttgcgttgccgactggtgagggcatctgcaaagaaacttacacccaccagttttctagttatgtgtacggagtactcttccctccctcgaccagtgttcagcgctgaggaataagggcggctgggcaaaggtgggtggagacgtgtgcaaagtgtgaccagacatcccccctctgcccaccggtctgtttgacttgtttgcaggatcgacgctctagaaaccttcgagaccatacaagcctaataccgaagccatttttatgatgttatttacaactgtattagaatactgccacgaacaggggtcaggggcggagtaactgtaataggtatagtgtgtttcgaaagagggttcgagaaagaatctctgtgtgttagtggtgaaactgatttcgatccatcctgtaccgtttggacagtttgaggcgctctacaacccgaccggtatcaattaggtacctaaaggcgatataaaattgttgttgtgtaccgagcgggaaggaatggcgggcccacatgcgggtgctcccgggcctcctcgcacaaccacggaacggcagtgactgacgcgtcggaaaaccttgattcgactaccgcgccgcggaccagaagacaggctcggctcagcgatggctactccaacgcagctcgctcaatgaccgagatcacgagctccgtagacaagagttggcgcgtcacgactcgggacatctggcgtatgattgatggcttgaaagaaacgatcgcctaccaaaccgagctcatacaatccaccaaagacgaactgcttgaagtaaagcacgaccagaacgtcctccaaacgcagaacgagaaactccatgaggaagttcgagccctaagggcgcaaatcgatgcgctcccgtccacacccgtggcaaaatcgtgggccgcggtggcagcaagccaccc

SEQ ID NO: 39 - DNA, 4406 bp, Penicillium roqueforti
gatgaaaaatgacagtattcatcctagattctgacaaatagtatccagtgcctcaattttagagagccgtgaagggttcaacagtcagccaagttttcttgaccgactcagcttcctgttcttcaacacggctcttgctcgtctctcgtgctgagcattgaaggtatcaaaaaggtcggtgcaaatagtcgctgtaaaaagaagccacgggtttcaacaggcctcaattaagagaggtgtccatcaacgctttctaccaagcagagcacttgcgcaacagaaggagccaagaagcctataaatacgtcctctacccccggcaatttgctctacaatttaatcatttgactacgcaaaatcgagcaagctttgtgcccgaggcatttgataagttctttctctttgacccagtactaaaatccgctgtactggctttatagaatacatcatggaccagcaagccagacggcgcatgtgagggatgtatctccaccagatgtactgccattcacgcccgccgatcaaagatacgagttttgggttagctggtcaaagtgtttatccaaagatgtctccgctatagcagtcgactgagctgatctatcgtactgtctctgtgtgtgttcacaagagaaagcgcgaatatccacgtcgcaggtatatgaaccttagcctgacaagtctgaattccactgattttgaaaatgatgcgattttcaatagaaccgaggacattcgaccacagtgcaagagcgcaagagccacagctctttgccgtctctttgtacctagtcttggccaccagaacatgtgagtcatggattaggctactagcgtccaatgggtgatccttgttttccttggagggcaggtagtaaagtttttcctagcctacatattcaaaagacaccgaggcgcgctgattttcctgtctgtcttcatgacaggtaagccgtacctccgcagacggccatttcaagtccgctgcaaggagaaggtgaggcaaaaacctgttattgatagcttaccaatataacactggtcatcttaggtaggaatagagggggcaagatgacctttttaccccgaggcatagccaaaccaacgagagctcaagacccaagaatcaccgatgaatagatattgatccacattggctggaaatatagtttgtagttattggggaatactcggtaatgttgattgtatgctcgtccaaagctttccaaagctttcaataaattgcttgtctttgtggcaaagctaacttcattctcccgatcgctatagggtgaaggcattccaatgtagagtaggttcgggtgacttgcaatcgccgcctgaagcgatgactacgtgaggaatagagtccatcacatcaagatattcgattgagccaacgaatcgtaatgtttgagcggcacctcatcacatgcttctacaccaattaggtctggtcttgggcgtatctattgcatgaccataatggaaaagggaatctgttgattgcgttcgaccagctcaatcagactgggggttgtaagccaacttcaccaaaagatgggacaaaaagtgacacggagttgaaacaatgcaaatcgatacatctgtcatgtgggtgcaacactcacgacactcgcaacactcacactaacactcacatcaagcgcccgaccgatcaccaaaacggtcaccttccaccacccacaccaaccagaacactcaccacaactagacctaggaatagttcgggccaggtcctaaattccgggaccgggaccgctaagaggaccgctaaaaggcccgccaagagggataaaaggtgtataaattatgatttataagtgaattatttcctaattaggacaatctatgattatttatacctagaacttttcttggcggtccctggagctcaaggttaaggcccgccaagccttggttttgacggacacactactcttcacaacacttgcgattcacaaaaacattcacatctaggactgctctacaccttaatagcggatgtcgcattctgttgggcggaggggctctatcggaccgcaaactatcaaggtggaaatattggtaatatttggctcttgtcaaggtttggccagacccgcctcaatctaaatctggcctagcacatccaggactggcgaatggaacaaagctatcagtaagggtccattatcttctggtagaccaaactccactccccgcccgattaacctggtgacagcttgagcacatgtatcaatccattagaaactagtcttaggaaaggatatggcgaagcaaatgtcgaagaacaacattatcctcccctttttcaggacctctacaggaatagaacttattcgtgagcttggtatattgactcagctccccaatattcttaaaccggtgaaccggcctatctcccagccccatacgagcccaatgaatcaaatcaacaatattgacatatacatttcggatagcctaaatagaacgcagacgacgtcagccaccagtccatgtcccattccataaagtcaaaccccacaggtaagaagatagggaaataatttttacataccactctagcagcattacaagtcctaggcaatggttcaatcccaacagcccgacaaagagaatgccaggaagcaagatcgctctccgacccaaaccagagtcggacttcatcttccagtgaattttgatactccctgcgtgctgttcagcttccgggtcgtttctatcccagtcgtagaagtccacgagctttgcgtatgatacggacggtggaagtgtggggtcgtatttgaaggatgtatagtatgcgaaaaagatgtctagtggtgtggggtttgaacgatatccttgtaaagggacaccgtgacgttctccagcgtgagctttcgagctttgtatatgtgcatctagcgcatcttgactgacgaatgatcgatcgcatggatcacattcgaaagttggggtatgagccgacgaagactgaagatgccgatcaagagcgctctggtcattgaagaggcgtgtacaagatttgcattcaaagtttggagtatgcgcttgtaaattctggagattttcttctaattcttttcgtgtaaggtagactaaactgtaaagtttgtgtgcgaatgaggtggcattcagaggtgagtactggagatggtcgttaaggaagttctggctaacaaaagttgtcgagcagatatcgcacttgaacttggatgtgttgcgcgtgggtgcactgtgaggaggggaggttcggatgtgttcttcaagagcatcaatgtcgaggagccagatcgaacataggccacagtagaactttatagcatgggctggtgagtcttttatgtgttggtcaagggaggtctcggatctgaacgatcgattgcacgaggaacagaatgccataatgagtagaccagactagtagcgagatggttgaatgcgtggaattgaatagtgtcggttaaagtggagaggaatcttactagcgttatttgtttcattcaacacccactgcttcctgattcccaaggcatcaactgctgaatcagcttgatagcgcccgtttattttgctatcaggattatatagaaatacacatctcaagtactgtgcaatggcctcattggttaattctagtactagtccatactgcatctctcggaaccgatagaattcccagcccggtatgtacagtaccataaaccaatcctaatcctgaccgtgaccgtaacgaggcgaggatcgttctggaaggcctgaacccgtttgcatttctcaaggtcggattgccaggcaatgaaattcttagtggcagcaacatgcctggacaagctcccgcgaaggcagtaggtaaatattttccttcgtctgcggggcgatcttgcgctcggctggggacacgagctcgaagagagtcccctctcgtgttgagaccttacttggcttgcccagagatctcaaggatcaatgtttaattatctgtgagtttcattggtttcccgtttcttctctcctccttgcttctccctcattcctcccaccgtcccacctgcgtcactcggattttctcggctctcgttttcttgatgcgatcgagtccaaactagtctcagacatcgagatctctggcggcacgtaattccttattttctttcgcgagtaagatggcaccttgcattgtaaggcggaagccttttataagctggtttaatgcacgatccgatgggcttagtggaacttcgagatcttgttcgaagtaaagctttgattgatgaagcctgtcgacgtagttctttctccgtagaatgtgtttttggggtaagatttcggcttgattcactacccctgctaggggggggggggggggttggggg

SEQ ID NO: 40 - DNA, 4065 bp, Penicillium roqueforti
gtacttataataaatcctaagaacttagttttctatatagagaatttatacttagatagtataacctataatcctactctttatagttatttaaggacttctctaatatatttcttatattctttaagtatcttattatagattataatattatctataaatataactatatagttatctatataatctctaagtactatatttataaattactagaatattataagactatttataaggctaaatagagttactttatatttaaataatctatattaggtatagaatattataagatcttctataactagtattaatctaatatagtaaaaaccttagtagatattaagctttataaagaattttacttttttattagagtactttattaataagaggtaataggtaataatctttccttataattatatttaatcttcagaagtctatatagaaatatagactattacctagcttctttactattaaaattagtaaagtatatagagctaaattaagaataataaatcctttcttaagattattaaggatatactattttatagcttttagtttatctaataataatttatagagtaggtagtatcttagctatacttctactttaaggataatattatactctacccttaggtaatatagtagtagtttattagattttttcttagagaatatttctataagattatagtattcttataggaaggtccttttaatcttattaagttctatatccttctttattatagatttaatattaataatctaattaattttatagaataaggtctaaaagacttcgatatctttattaataactatttatatttataaatagttaaatcctatctaactaataatactaatatctattaataggagaacttcctttatttcttcctctaatatctctatttaaagagatactagtttaattttattattaaggttctattctatcttataatactctgtaacttactagtacctatattaatactttcttataataaggtatagtttctaaatctttaagtcctactatagattacttaaggcttatttttcgaaaaggtaattatattattctatatccttttaataatctaatttaatttatatagattacttaaggattattataggtataggtatagctaactagcctactaccttattaaaaagggtattcttatctaattagattatataatactattagtagttaaagaggatattattctctataaactatatatatctaataattatattatattagcctagatctattattagtataggaatctactattagatctaattatttatacttagtataagaataatagtatatataatagattataataatttactattaaatcctttaactaggtacttatagtctagtttataggtatataacctaaatttcttactaagtaatataactagttctatattaataaatattaaactatctacgctagtatctattagtactaagattataaaggaatatctattataagttagttttatattaaatattaagctatcttatagacctcctaaaagcttatatagatctaatatatatagtaatacctattttctacctaggattaaaacttttcctaggctcctacttttcctaggtctatattatcttctaattctttaagtttagttatatataattagctataggtctaattagttatagtaatagcgcttatagctatatttacctttttctttaggtatttaaatattatataccccttttccttataataaaagtattaaccctcctttataagagtcttttactctatagctaatagtctagataataaggtagtccctttatattttatatataggataaaactagactagttagtagtagtcctaactctacttctaaatatagttattatataggtatatatagtaccctttacttcctattaaagactaatcttataggatatactttaataactctaggtaaaggtattaaaaggaactatttcctaattaatagtctatataacttaactctataatagatatagaagttttaaatataggttatacttatagttttttttaataactatggtttcttctataagctatataaatttagctaagaagttagtaaagtcttccttaggttttatcttaagtttatagtaggctatatatacttctatataataatttaggtttataaagatagtatagaggtagataataatatcttttatattagtatataggttatttaagattatatttattcttagggtaatatatagctatactttacctttatattagctttatatatatagtttctagtagactagtaataggtaatagtcggtatttactttaaacttctatctaataactatttcctatattttaaaatagacttcctttctatcctttaatattagtatattagatatctttatagacttctaactaataattcctataattagtatattactttagacttagtttattttactttaagtaagaataaggtaataggtaaggttattatacttatatatagtaatatctctatagatagtagctttattatattcttcggtagcttaattatattctattataagataatctttctctatatagaattaattatatttttctataagttaattatattcttctataatttatttaatagcttccttagaccttctattctttaagattaaaacttagattttattatatattatctagttattatctttaactatttagaactaattagttagtttaaggaattattccttattaggaattatatatataatcttataaataaaaggaattaaaggaccttccttaaggctattatatttaatactcttaattaggtcttatattttaataagaattaggattttagggttagtagcttcttctataagataatctaatactataggttattttcctttactaattatagtaatctattatagtaagactataactaatcctattctagttagttttaggatagataaggtaaaactagactaggataaattataataattatttatataattatatagctttagaagtttaggtttaaggtaatacttaatattatattatatactagattccttttaataaaagaagtgtatttctaattagatattaagtataagaaaggaaaagaaaagaaataaatataaaaataataaataggcttttatacccctctaggggcaaagccctattctcatttcccctagaaggaaggtataactacctatataaacgaccaatagtataatcctaaacgggaaagtataagtcccgtaagtgctaattgtgataagattaatcttataactgactcgatgatttcatgacttttatcagatgaaatgaaataggataaatagtataaagtaagtaaataatcgaataaagaacatatattctaataattactatagattaactacctttctcctttattaagaataagtccttttagtatctcttttaaatagcctatatagtactattctttccttagataccttctactataataatatactagtatttatataattatatttaagagaatataagcttagtatttaggatattacttaagaatataaaaatcttaattatattagattattagatatccctatataattagggatttatagtaattactagctactttattaaatatatattagaaagtatcttagtactatctttcttaaaaccctagttaagtataagattataaactaggtatttagaattataactaataatatttctaataatataatattaattaaggttacttaaataaggttcttaagtaatatataggtattctaaataccctaccttatttatattatttagctctcttttaactagctcttagattatctatagattatactaaaaaataatattattaagttagtttaaactaat

SEQ ID NO: 41 - DNA, 3774 bp, Penicillium roqueforti
aggaagattctctcatgtttataaacactagtccctcagctgctgtggtggatctttcccttcaacctctctacttagtgaccacttgaactagccaacatctcgtcaattctattccaccttatactgttaagatacagtctgataaaatatgtcgactatcaacatggtgaaatactacttctaccggggaatgctccctgaaaatcaacagaggctgcgagacttgatagcccttgcctatcagaccgcaagagacagaaaactctaccccaaggccatcctcatcaggtgagaaagaatttcagcacaacgaacaatgatatagagacttgtggcccatgtcattagagacttcgctaatgtcgaccggcaggtccaatgagcactccagtaccagtcaaggaggcatacacaagccggatcccttgggttggcatgtcactctctgtttcaaggacgacgtccagcttgccagcaatacccatgttgcttctcatggctacgtcaagggcaaaggggacttgacttttcttcaagcgactcactcaggggtgaagccagactcccacttgaagtcgagtggaaagccggtatggccttctgaaatggaattagatgttgcaccggagattgggtatggtcactttccaagtgctggtagtggttaggtttggggttaccaatatacttggatcttgaagggtagcaaccggtcgatacaaacccaagtcttgttatgaggattcaccaggggatagtgatagctgctgcctgtaaattcgtgttgcaattggtgctttgtgcggaaaatccaagaatggtagataaagtggctagcaaaacttggcaaaaacaaagacaattacatggatttatataacacattaccgtggaaatctgaatagtgcacaggcgtgcgtattattattattcgtcagcgtgtctgcaaggttgaaattgtcagagatagtgtcaagaaacatgaagatactgtctttttattgttgaaacacgtgacttttgtattatgcatttgcttactaattgtgtctgaccagatcgtcaaaatcagatcattgttgtttttaattagctagacaattttaccattgtgcatttattagtgcgctcgccatacatctaatttctatcaaatagtctcattagaactaattgtaggaagagctcaatttccaaatgggtttttggtagctgattggctaataataggggcttggcacacacttttcggatgttatagttgccagaattctcctgtccactgatttttgggtcgtctagtagaagttgtgccctcctctgggaattgtggcttagtggcgttgctcctctagaatctgaaacattccgcgatttccctagccgcctcgtccgcgcggtcgctacggcgactgactaagacaacacaggagggtcatgtgcgctctagacgtcaacttatcatctaccaaacaactaatacgtcaagctacaggaaaactatccttttgaaagatgaccttgtggcggcataattaatcggactttcaccgcctaatcatttacttaactcacgtcgtccggtaatggccttcgtgatcaggtcacgaaattcactttgggcccgtcaacaaagctctatatatcagatgttcattcacccaacatcttcctcgttgctctgctatccttgtttttggaaaatttctgctggtggactcgcatgcaaatcatttatggctttcaagaccttctcgtccagtgctgactctggtccactccccttcaaatatgtaccgatagaagaagtcgagagacttgaaaagtaccagcctggtgggtatcaccctattctgataggagatattcttcgatcccgataccgagtcgcccacaagctaggctacggagcctattcaaccacttggctctgccgggactaccagtctaatacatacgtggcagtcaaagttggaacggcggattcaaatgatcgtgaggttgatgtcctcaattatctcaaccactctaccccacttgatcacccggggaggacaatgataccctctatcaaagatagattcgtcctccatggccctaatggcacccacccttgctatgtgacaaccctagcaatgtgtagtgtctctagtgcgaaggaagggtcatacaaacgcatctttcaggccatgaccgctcgctcgctgattgtgcaacttttgctagccgttgagtacatccacagcaaaggagttgttcatggaggttagtcaccattctttatagctttacaaccatatgcttatacaacaactacatcagaccttcacatcggcaatattcttttatgtctcccagccgattttgatcagctctcaatcgaagagttatacgagaaatacggttcgcccgcgtcagaaccagtgattcgttttgatggtcagccccttgagtctagtgttccgtctagcgtcgtccctcctatctggcttgggaaagcttcagaggaattctcccttccagaatctagagtcctgctcagtgattttggagaggcatacagaccctctacagattaccgatataactcgcacgctcctatgtcctttgtgcctcctgaagcccgatttgagtcagaatgtggtctttctttttcagctgatatttggacactcgcatgttccatctggataatactcggccagcgccccttattcgaggacatacttgccacgccggacgatatcacagccgagcagattgatactcgggggaacttacctctacggtggtgggagaaatgggcggcgcgccacaaatatttcgatgaaagtggaaaaccaaatcaaggtcgacaagtgaggtcttgggaagaccgctttgaaaagcacattcaactcccacgacaacaggctggaatccaaggttttgacttagaagaaaaagctgctgttatgaatatgttgcggtcgatgctgtcttttgagccggaaaagcggccaactgcgcaggatattgtaaaatgcgagtggatggagagatgggcaataccggactttaacaagtctcacttagggggcgccggggccgcggacaattctcgtgatgctgttcccccctagaatatgctgtatgttgtagccgcatgcaaaatctcctctgcacaccgggttattttattttattcttttccacgccaccaatttccttctcttggcctattgaatcttctgccacctctcatttcttcttaaaacacgttgaaattctggcggcccgatgctattagtataggatagatcgaaatcagttgcaccacttacacacagagattctttcttgacccctctttcaaacacactatacatattttaattaatttaccccggtccctatagcttgaccggtatatagaacaatcacattagggccggagcgcccccattagggttaaagagaaaagagccagtgagcaagaatctctagcactaagcctaagattgaaagttgcgggagcaatcgtatgaaagaggtggctggatcactggcctaagcggctagagcccttgcacgaggatcccaatttagtgtttgaagagggctttattgttagtcagagctcttcgcgagactattatacttttttttacttataacgcctaggattttcccgcttaggtaatcacatatgggcgagtagctcaagttatatctaaattacactgagctcagattggcccgtgatataagtcccgccgagtgcgtttagct

SEQ ID NO: 42 - DNA, 3164 bp, Penicillium roqueforti
tttctatttttttcggcccagtagagagagcgcctggtcatatgatctccttttgaggcgttccctccaggggcccttccgggggaccccttcctagggggggggagagggttattttttttaattgcttcgctttgctctgtaataataaagcttaggaatttaacttccttttaatagaaagggggggggggtgagagtataagataaagcattatacctagttttaccgccctctaatactaagactaagttcttaggatttattattaatatagaaggaatagctattaatcttaaaaagatctatataatctaataatagaagatacctataatagtaaagggagtctaatcctttcttagattctataacttctatagataatttatctaagggtatagtgctatttctaagctactctactacttaatttaaagagatatagtctactattagttactataatataaagatactttctaaaagttaaaaaaaagcctaattaaagctttaatcctatattattataatctaaaactctatacctaagtagaaatagatactttaaatagagtcttaggagtagtcctaatataatactataataataataacttctagtatcctatagctttctttttaaaaataatataagctactaaacttaactataaagtataggataagaagttattagctattatctataccttataagagtagtaattaaagttagaaggcctttttagaaaggagtattttaaaattattatagattattaatccttagaatactttataactataagatagataaattagtagtaggcctaatagagtagattcttcttatagttctactttattattaagtattaactaggaaagaagaatattattactaatatactctcctagaaagagttatcttatatagactaagattaatagtttactatacttcctaaagaataccttaagaaaggtatatatcctatagagcttttattaattaaactaaaagatcctaagattataaactatataaaataagctaattagtaaaatattaaactaaaactattctaatagatagctattaaaggaagtaatctaaagtagatactttataataaactattactttttaaaaactaacttaaggttcctaataaaggagatctttatataaggcttcttaataagatatattaatagctattagttatatacctaggaattaagaaactaaagaaattagtattagaataatattattagttaaaataggtaatagatattaagtattatattaataattatttaatttataaaagaataaagatatagagagattatactttaggactattatattccctactaatactagaataactataataatatattataatagattttagatctttcctaaaagattactataggtataatactatatttatagtaatagactatttaagtaagtaactaatattaattccttattaaaaggaaatagatataaaagctataatatacctatttatagattatattatttagattataaggatcctagatataattatctctaattaaggagattagtttatcttagaattctagactaagttctattaaatcctaggtataaaaagaaagttattaactatatattacccttagatagatagataaaataaaattactaactagtatatagtatagcgattataatcctatataaaatagaattaggataattagttagaatatctactaatagtagattttatagtattaatactcccttaagatataattaagaaatccctattctttattaaaagaggctataaacctactatatcttttaattaaaaggactaagagactttaatctagaataagtaagaagtaatagatatactatcctacctttaggatatctaaatagagataaaaaattagattaaaaagtcttagtagttatagatctaataaataaataaatatcgctaagaagaggattttaatataggtaattctatatttataataataaaggattagtagtaagattagcctaattaaaagctctcttatttagtaagtagtctttataagattatgagggatctcgctggcctatagccgcgagatagttatatagaacgaaacgactaactgctctttttttataccgctatatataaataaataatgtaaatagtataaataaaataaataggtaggtagggtcttatagctgagagaaagatataaaggcctagctatatactatatattctttactataactatagagtagatattatataatactattgtctaactatattaggattaatatatactctgattagatagattgtttttttttctaccggctagatctattctgctgtttctcagcgattacttttttaccgactagatttctatttttttcgacctagtagagagagcgcctagttatataatctccttttaaggcgttccctccgggggcccttccgggggaccccttcctaggggggggggagagggttattttttttaattgcttcgcttcgctctgtaattaaaaaagtaagatattcttattaccttaaacttctagaatctattaaggtttacctaattttctatttaagtaagctttataaagtagtaataatagagctattactaagatagtatctagacctactactactagtataaattagtaaaactaataaataggagatagaaaagatccttaatattaggacttactactagaaattatagtataggatttaatagctaggatataacctagatctataatagtatctagtaagtaacttctagaatatattagataagattaaggaattctataaggcctacctaataaaaccaggactactaatataactataggaatagattaaggtagtagaagaagatagaatattagataactatattaataatagaaagcctatatttagggactaaatatattcttagccagaggttatataataatctaggtaagagcgacttcccttatttcttctaaaaaaggtaaataagcttttatactagaagtaaataagtaaataggaaggatataagaagg

SEQ ID NO: 43 - DNA, 2933 bp, Penicillium roqueforti
ataaaaataagaagaagaagtaaaaatagacctaatctagaaggcagatacccgccgaagaaggcctctctatttaagaagtatctgtattaattatatagtaataagaagtaattgaagtaccttctcccggccccggtatacctagagaatcgactatttaactacatacgcgccccccccgggggtatagaatatatagattaccagggcatagaagagaaatatatctagatagaccacttagttagttgatttaatttaatagcgttatggttgagataaatgtatttaaaaactagattattaaatggggtggcgggtcgtatatagtggcggctcgtatatgaattacgttaacatatttcatatacgagctggacacataagcgagctggataccctacctaccctagtgaatttaaatgcatttatctcaactaaaacgccattaaattaaatcaactaactaagtggtctatctggacatatttctcttctatgccctggtaatctgtatataccatacccccgggggggccgtgtacgtagctgaatagccgattctctaggtataccggggccggggggaggtactttagttacttcctattgctgtataattaatacagatacttcttagactaagaggccttcttcggtaggtatctgcctttgggattgagtacgcttttgcttctacttctcgttagcggcctataattccttattttctttagtaagtaagatagtaccttgtattataagacagaagccctttataagctagtttaatatataatctgataggctaggcgggctttgagacctagtacgaagtaaagctttaattaataaagcttactaatgtaggtctttctctgtagctagtattttaggggtaaaattctggcttaatttactaccttagcttagagggagggtcggggttcgaagctagatatttagctttaaaatcactcggttaggtctaaatagtactaaactggtagctaagaagctatttttaattatctctaatttaaaagctttaatttatatagagggatatacttcgaggaagttaagtttattaatataattgatcctaacctgtatcttagttttaaccatctgactatacaatcgttttaataccgtaaaataacctatatcaagaggttataaaagataagataaatatactggtatatagattggtattaccttattttacttgtaaatttggttaaatttaggtattaaatgacttctatagctattaagtattaaaagccagtatcccccctttatatataaagaagtactaggaataaagagcttctgaagctaataaaggctaattttattagagatctagctgttaggactaaccttaaagtactaatcttctaggaggcccttgaaccatgatttaagaaagactttgcctttaaaaatcatatatagaggaagggcctagctagaagtatttatatacttaataatagttacctactcttaatttctaggttataaaagtacttactaaccgtagtatttactctgtgtaataaccttcgcagttatagttaatcctatcgcgaaaccagtcttatcaaagttataaatatcattagggtcgattctaaattaaatgatcgttttttaaactagattaaaccactccctaatgattttagggtctttacatttcgcgcgcttatagttatatcgtttcgagaattaggaggaaaggagaggacgttatttaatgaagtttgtaacctagtttttaccgaccgaaagaaccggggtagttctacgcttttaaagaagaagatctgccatttcttatactatagagggctggggagctgctctatatagatctatagagaggatccatttcttaagcgattcctctttaatttctgtcaatttagatgaatttgcacgagaattcgcgcggttttataccctatggaggtgtgtagcgagagttgaattcggtatattaaatcggcgggcggttttatgaattgaagagatttctcgattcttaaaagcctgtatagctagtaagatcctaccctcttgctctgctaaatttttagaggattgagagcgaattggtggcatagtgggtggttgaagaagtagggggtaaattaattgacgtgttttaggtggggtgtccagctcgcttgtgtgtccagctcgtatgtgaaatacgttaacgtaattcatatacgagccgccactatatacaacccgccaccctattcaataatctagtttttaaatgcatttatcttaactataatactattaaattaaattaactaactaagtggtctatctagatatatttctcttctatgccctagtaatctgtatattctatacccccggggggggtgtatatatggttaaatagtcgattctctaggtatactggggccggggggaggtactttaattgcttcttattactatataattaatgtagatacttcttaaacagagaggccttctttagtaggtatctaccttctagattaggtccatttttacttcttcttcttatttttatcttataattccttattttctttcgctagtagaatagcgttatatattataacttagtagcctttgataagttggtttaatatatatttagaaggacttattaggcttcgagattgtatataaagtaaagtattaattaataaagcctattgatatagatctttcctagtagtaggggtttttagtataaaattccggcttaagttactaccttagcttagagggggggtaggtattcgaagctagatatttagcttcgaaagtacccgattagataaaaagggtactaaaccagttactaagaagctatttttaattatctccgatttaaaagcttt

SEQ ID NO: 44 - DNA, 2649 bp, Penicillium roqueforti
atatatatatatatatatactttaaatatactataatattaatgtaagtctaaaccatctttaatatatgaacaagctaaaactacaaaaacttgagcttgaataaatgctatagctaactctaaaccagagaatgcaataataaatgctaaaggtattaaacctaatatgaagaatattacaccactagtcataatattatatgtgaatccacttaaaatacttaaaagcatgtgtccacttaatcgtgtcacaaatttatcccaaactttaaattaatattttaaatcttaactaataagcttaaactaatttaaatatatataaacctttaaaaggtttagttctattttcctttaaatataaagatatactaggttgacggtatcctaatgttcttgcagctgcacctatagaagtatatattgtaacttctttagtattaatattagtaacttctatttttttagaagttttttgaactttatctatctttttatcattagaattaactaacttaaaagtatatttacctaaaacaggtttatcctgattcaaataaatgtaatgttctatatatcttttatcaatacctaaagcacgagcggctgcttttatggcgttataaatagtagaaatatttgtttctaaatctactacttcaatttttatacaattaggttgagctgcagataatttaatcaaagcttctatagatttatctctattaagagctacaatacgcatcttttctattgtagcttctgaatgtcttcaactagatcctcgagatggacttccaggagtatttaatatattatactctggagaatacacttcaaaaaagtgtttttctcttgacataagatcatttatatcacaagtttctaaaatagttaaactaaaattatgataaccgtattttaataatgcgacattgataggcatactactttcactaagtagtctattaatattatagtattctaataatctacgtcttaaattaacagaactacctacatattttttaccattcaatttattagttcacatataaataccagttttacctttaacataattaaggatatctaatttatcttgatctgcatcagaaaaaacagttttatctaaaggatctgtagaagaattacttgaagtagaatatgatctaataccaatttgtctaatattaatcattctacctttaaaaaggtaaaatctattaaatgatctagtattatttaaatcattttttaaaggaaatttattaattaaaatatataatataaatcgctcactactttatcctttctataaagaagtttaactttcactttttaagttataactaaaaaagatgtttataaactttctttctttaaaggtatttaatataaagcaaggacaggctattgtgatatctttaatcttgaattacttaatttctttcaagaaccggctttcccggcgactagagtataccttacagtatataaatatactgaagaaccgtctactcgttgctcttttacagatttattgtctgatttagatccgcgatcacccattcctattactagaatctttaatgatattactataccctcagtcattaatgaggccgcataagaagtttccgtcttatctttagttattaaagctttagggcttccccggagtttggctctttaaacacaaaagtgtgagggcctaatctcatcttatatgttagctgctaatcttaatcctaatgaaacatttctagataaatatgaaataaattcaattaaaactaataaaggtaataaagctaaaggacaacctgaaggtacaaataatgagaagaattttaacccatgtctttggaaacctaatatagttgcacctaaaacaacagtaaaactaatagagaatgttaatataaagtgtgatgtagatgcaaaactatatggtactaatcctattaaattatttactaaaataaatatgaataatacatacattaatggaaagaacatttgtcctttattaggattaatttgatttactactataccgtgtactgtagcatatatactttcttgacttattgatcagttattaggtattattttattattattagtagctaataagctatatgttaaaattaaaaagatactaattgataaatataaacctatatttgttaatgataagtgtaaattacctaataagttagcgttaagagaaaataaatctcttacttcaaattggtctaatggacttaatacaaaatctaaatgacgcatattattgtttatttataagatatatataaatattaacttattgttttcattacctaatgaaactctattaagatagagatatatataataataaaaaattattatgttttagttatatatataatacaactactaatttatataattataatttatttatgtaaatacgtgaaataaaagtacgtacaaatctaggtaatatgaatttagtaaatgtatatattaatactgttaatataacaaaagtaaatactacttgatttacaaaaaagaatggtactaattgtggcatatatttgtattttatctattatatggatattttcttaatatatatcttgacttttttttt

SEQ ID NO: 45 - DNA, 2630 bp, Penicillium roqueforti
ctcgaggtcgccgataggggcaattgcgtgcactttgttcagctaactttggtgtcagtatgtattacaagatgttgatgcttgaggtcgccgacggggagaattgcgcgcattgcaggatgctgatgctcgatgtcgctgatagggagaattctgtgcactctgttcggctgaccttggtgtcagtatgtattgcacgattgggctttaggataagtaactagttatccacaattataattctccctcgagaagaacgtagaatagcaagaagagagttagtaatcaattggtacctaatagcctgtgccctctggagccaggagtactcgagctgttgctcccatcgaagccatgaatactcaatagtctgcatccactggagccaggagcgctgaacctgttgtgcccactgaagccaggaatcgtttgtgacctgtatccattgaagccaagaatgcttaatagcctgtgcccactggagccaagaacgcccaacctccagtatccatagcgcccactggcgccagtgaaagaggcctctgacagcggccaatagctccccgatgataatcgtaatctccttggcgatccgaagtacctctttcacttcctccaggaccttcttcgcaatagtgagcacctcgagtactccccgcaggatttccttcgcccgggtaaggaaagcgagcatctccgccatggagcagggcatggcagcaggcagtttcaagaggtaataggcgacggacacagtagtgaggagcgtgaaaagcgactagaggatagttagtatttttgggcttagaataccgcctggagaaattctcttactatcgtcaacgccaaagggaacgccattgagacagcttgaacttcagcggtcaggcgagccggataggaatagctgaggcagtagaatcggtcagacttggcgacaaagtagtaaggacatagggtgtaccttgagacaattggaaagctgtcgccagagtaagcttggaggagtgttgggggaaaagaaagaagatctaggcaggcctcagaagattattgtttacggcggggcgcgagtcgcgcgactcggcgacgcattatgcggcaaccataatattagcaattgatactctaccacggagtatctaatgcggtataggctttgccgctgaatgcttgctgagaattgtctacgctgggtacagcccgcaacccagcctcgattatcttgaaactttcataggtactagagtctaaagccctgctatgaagtatgttgtggggacttgaatatctcaaaagtttgatgtggtcgcggaggtggagccttcccgcgccaagcttctgtcaagtcgtgcgcatctgaatacttgcatgcaaatttctacccccatccaatcggccaaaccgagctaaatcgcgctgaggtcttgacagtttacatttaactccctaagaagtctacttgcaaaagcataggttcggaacccagctttggtgctgggttctgggccgatgttacgcgggctgattcgacatgttttgttcttgagtcggagattctgccacagaccgccttcttccgaaacttggacagtacttactatagttgaagcagtagttataatcgattgtaccaggggattacgcgcagtctgtttaagtgaccctggtattaacatacattcgacgatcttgatactcgaaggtactgaggcaggtgattggtcgcagtttgcatgaaaagccttagtatcagtatgcattccacgattttcatgctcaatgtctcggaggggggagataacgcgcactttattcaaatgatcccggtatcaatatatattctaggatatcaatgctcaaggccgccgaagaagccctggtgtcagcatatattccaagtttttgacgccttatgtcacagagtcgggattatacatagtttatacaatatataataggagtgacttgattttgcgccggagtcataatctttaagcatttaatttcacaacactacctaaacaagttcgaaataccaccgttcttctacctccccctatatatagtatgtgggtatcatcgagtcccagcccgccaacaatgtcttacccgtatcgccctctagctgagcgacagctgctcggaccgtctccacgatagcaactttggcccgagtccagagtgcaaattctacatcccctggcacaagaccaatcatagtcttctcacacagcgggacgcgaaccggagtgtcttcggcttttctaatcttccccactcgcgttccacggatctgtgagcggcgatagacgaatttatcatatagatccctgtccgtggctgtagcgctcggcccaagatgccagtagtcgatgtgctttttcgcaatgatataaaagctggatgcaagctcgcctgaagcctctgataccacttgtagtgtctccggctgccattgatgcttcttggtggcaccggtatcccagaacgattttacccacactagtagctggatgaagtcgtatgcatcttggtgcaatcctcttgggacctatatccatcattagctcagtccaaccattcatctcagtcacataccataatgcactcctgctttgcagcccgac

SEQ ID NO: 46 - DNA, 2551 bp, Penicillium roqueforti
ggatgaaaaatgacagtattcatcctagattctgacagtttcaagaagatacataccttctagaacattctatagaccacgtagacaaataatcagctcgccactcgatagagtaccaaggtgctctcttgtgacagtagctaggagaacacgatcacattgcttttagtctatgtaccatttcgttgccgaaagtctgcgtgatattccaaatacagtaaacgccttactcgtacttctgaaggtggcaccttcggtaggacgttgttagtggtggcaaaatattctcagaccctgctgatttcttctctagaccacaaataggagctgctgcatctgttatgtcccatgggtggtcgctgatctcttcatcgcagagccatattatcgtcagtcagtatcctgcgcggtgcttgattgatgctaggctcccttatgtccgaggatatcatcagagtgtgatagtaccgttgcaatatgggctagacattccgtggtcaaccgccctagatagcctttagaaaggcattgtactgtcgcgcgacagtgacaacgatcaatcagagttggattctaagtgacaatccgccaggccaacgccccctgctgattgtaggcttattttttacctttccagcgaagggaatcacatagattgtatctggctcttcgcttccgcccaaacccctagaagggattagttgggaaagcgcagtgctgggtatgcctcaacttgtacaaatgcttgcaactgccagcataagtagtggtagctaccgtttgctaaggggaccgaagaacaagcagtacctacattatagctgaggccaaagagcctttctcctgcgcaaaagcggcaggcgcagaaaagagctttcgccttatttcagggtctttgctttagtctccacctaaaccttttaaagtcacaacttctcgggaggccggaatggtcaatcgtcttcttcaacctgcccggcgtcttgcttgaactaaaaatcatccctcgaacggaaagggcctatatggcaaatgaactctcgaagtaggctaggtcaccctcaaaccggtcgcgaatgggcaacaagggctggtatatttgtttctattcttcgtccacttattctaaactccttatttcttatactctatctcgtcgttatttcaattatacccactttgctcatgctggcttttaggggcatgcgattataaaacaggcccagataaaacatcgtgcagcagctcatgaaaaatgtttggatgtgatgacccaaattgagcaagaggttgaagcagttgttagggaaatagacgaagagagggcccggaattctcaattgatacagcgtctgtatactcagaaggcctaggagacttcggaactgcagcaggctatcatggcgagagacaaggccttggtcgagaaagataggcttgaaaaggagctctgccagctccagcaggagtcattgaacgctaccatgcaggatcatatctcatggaacaatattcagccaatcttgcatcagacgtatagcgagctggggtcggcgactactcggccctgaaacaggatcgaagccttccagagtcgcataccagaacttaattttcccggatccggagtaatccatggaacttggcctggccacgatggcccgctagggacttctggctacaataccctacctggtttctccgcatcgagtgggtatccgcctattgcccagcgaacactagccccgaccaaccaatttggatcgctatatgaaggaaaaactatccaaggcttccggattttgctgtaccggaaccgcattgtcgatttcttataattaccacacagatggatagaccatgacataatcttcggcaagaccatcgccttcctatgaaaataatagaaatctaacataaaatattggtccattagtctcccgctgtagtaaaaaacttcttccgatgtctagatttccacttccgccacgcagcctgaaaggcagagagtatacccgatagccactggatgtggttagaggcagaaccacggggcaagtcatgtggatacgggataatgcgcggacccatgggaagcaactgaatctaattggcattttctgtaatcactaaaactcaatttaggcgctatccgcgggtcggtcgaacgatttggaatattctaccaagagtacaacgggcaatctgtttcagacccatctactgctaccttcttagtcttaaagtttttttgatgtcacattattaacagtggggttcagccgtgaaattaagtattgcagtggggaaagtcgggatgcctgtttaggggccttgtccttcaggcagagaaaacgaaagcctggttgtcaagtagagtttcggggagcagatagtcaagagggatcaacacccaagaatgaaaaacgagttgcgagatgtttgtgcactaggagattatatgctatggtgtggtctatatgatccctatgcttgctagctgaccccccgggatggttggtgttgttgtgtcgtcctcgtcttgcctgca

SEQ ID NO: 47 - DNA, 2498 bp, Penicillium roqueforti
ctaggaaatagaatattattatagatattcttttaaggaaggaaagcctttatatagatattagttaataccttatattactccttaaggaatattttaaagaagaaatgaaattaatactagaaattaagatatttctattatagatagaatctatataggatatagaggccctccctctattagttaagactatatagaatttagatataactaaataaatctagttagtaaactattagagctttaagctagaagtattttattagactataagataggaaacagatccctattaggtagtataagatagattactactatttaaagactatcttaaagtccctaataaagggaatctttaagtatagttacttaataagatatactaataactattaactatataccctaaaattaagaaacttaagaaacttattataataagatactattagctaggatagattatagatataaagtagtatatagataactatctaatatataaatatataaagacctaaagagattatatacctagtttcttatacctattactaatttctaaataattatagtagtatttattaatagatttctattctttcctaaaggatagatatagctataatatagtatttattattattaattaactaagtaagagactaatattaattccctattataaagatattaatataaagtagatagtatatctatttatagataatattatatagattataaggattcttaaaactattatattagactaaggggaataatttatctctaagtttaagatagagttctatagaatcctagggattaagtagaaactatctactatatactacctatagatagatagttagagcgaaattataaattagtttatagtatagcgattaagactatatattaaatataactaggataattagttagaatacctactaatagtagattttataatattaattcttctataggatataataaagaggttccctttctttattaaatagggttataaactagtaatatcttttaactaaaattatataagattaatatataataaataagaagtagtagattaactcttaaagttataatagatctaagaagatatatataaataaattataaagttataggaactataggtataatagactaactattattattataaagaagactttagtattagtaacctagtttttattactataaaggattagctataggactatctaagttaaaaactctcctatactactagtagaccttataagattattaaaaaggttaggaatatatataaattagacctactatagttaattaatatctacctaatatttaaattaagtaagctataaaaggtagtaagtatagaactacttataagataatatatagatctactacctctaatataggtaggatagactaataagtaggaagttaaaaagatcctagatataagaaagtattataggaagctgtagtactgtatataatagttagaatataacctagatcctatataatacctagtaagtaactttaagaatactctagagataattaaggaattctataatacctatctagtaaagcctaggctgctaatatacctataagaatagattgaggctatataagacaattagatattagataactatatagataataagaagccagtatttagagactaaatatattcttacctaagggttatattacaattagtacttataggactcgtactttcctatttaggattatactattagtcgtttatataggcagttatatcttccttctaggggaaatgagaatagggctttacccctaaagggatataaaagcctatttattattttcatatttacttcttttcttttctcttttctatacttgatatttaattagaaatacacttcttttattaaaaggaatctggtatataataaataggaaataagaataattataataatcctatcttagagagtaagctttaactataatataagcttaaataaaccttaatactataagaaaagatatctttatcttaatccttattagtctaactagattataggaaactaagattaaatagaattaaccctactaatattattattaggattagatctaaaagaaagaaagaagagatagattataaggtatatataatattataaaaagaagaattacttaaattaatttatatattcttaattaaaataaataagagatttaaaagaaaagaaagaccttataaagattagcttcctctattactataaaattaaatagaattaaaaaactatatttatataaaagaatttaaagtagtaatagaatttaagattaaaaccctataaagaaaagaaaccttctcttagatcttaatactaaaaataaaagatatatagatattacctttaaagtaggtttttatatataaa

SEQ ID NO: 48 - DNA, 2459 bp, Penicillium roqueforti
ttgacaagaaaaccctttaccaattaagttactaaccctatatatggctagctgaattcgaatcagcacactttacttggaaggtaaatagtctaccattaacttatagccattatgataattttaatatttaaattatttacttattatgactagctgaattcgaatcagcacatcttatatggtaaataagcagtctaccattaacttatagtcattttccaaatttgaactcagattatagtaatctattaagacctatgggatttgaacccatattataatgattaaaagtcacatgttttaccattaaactaaagtctctaaatataattatttattataattatcacctatcctataggaatagtagtgtattttactagattaatataatctagtaaaattgttttaattcatgaaaaaaaccctccacttcatgaattgaattttttccctctctaactaattcatgctaagatctaaaaagatcaagtctctagattttaaattgaattagttaaatcataccctgcttacaattattatctaatttaataaatatataatttatgttgtataataacaggtctaaatagacctttagtttatctaaagataaagcaaatatatcttattatttatctatatttagatattataccttaggtataataaatagatatctaaacatatttatttctaataacctcagtaatatacagaaatatataagaataatcatactacgtctacaaaatgtcagtataatatacctgattcgtaaccaaggtgatggtgatctgttaaatggtatgcagctaaacgtcataatcctacagctaaaaaagctgttccaataataacgtgtaaaccgtggaaaccagtacctaagtagaaacatgaaccataaacaccatcagaaatagtgaaagaagatactgaatattcaacaccttggaagaaagtaaatactacagctaatataattgttatagctgttccatataaagcaccttttctattaccttgtattaaagaatggtgagcgtatgtaattgtcacacctgaagataataataatatagtgtttaataatggtaattcgaatggattaacagcttgtatacccaatggaggtcattgtgcacctaattcaacactaggtgatattgcactatgaaaaaatgctcagaatatagctaaaaagaagaaaacttcagatataataaataaacctacacctaagtttaatcctttttgtacagcattagtatgattacctaaataagttccttctgaaattacatctctaaatcataaagccataacgtaaataacgttaaatacagctaaagctactaaatattggaatccaggaaatccgtgcataaataaaactgcagttgttgttaatataaataaagacaaactagtaaacaatggtcaaggtgacggtgatactaaatggaaaggatgattttgaaaattactttttgatttatatatcatattttaatttaataattaattgtataagctttatctatctatttttgttttattgtgataactatagcacctaccatacctaatagtaaaataatagaagtaacaattaatcacatagaataactagtatacataatattacctatactagctatatgtgtaggttctattagtgaattatctcaacctttactactagcataactaatttgttgttttaaatcaactatattaaacaattcattatctaattgtacattatatatatcagagtatgaattagataaataagaaacaatactattttctgtaaaatttataggtaatacctgtgccattatataataaaaaataataatagttaaaccagctaaaggtaaatcattattagtctcatgaaataattcagaaactctaatgttaattaacattaaaataaataaaaataaaatagaaacagcacctacataaactaatatataagctaatcctataaaattatatcctactaaaattaataaacctgcaacattaacaaacaaacctattaaaaataaaacagatactacaggatttctacaacttatagtaagtatacctaataaaatagatactaaataaataatatctacaaattctattctaaatccattagtaatagaatcatttaataaaaatatattattcataataaaaaaaactaaatctattaacatattatacaaacaataataaatgtctagataggattagataaagatctaattagggagaaaaggaatcgaaccttcgatagcttatagctattgagtttacagctcaacccgttaaccagcttacgggacctccctatttgatatatatattaaatcatttactggaattgaaccaatttattatatacctatatatgattatataatatatatactattattttttttttt

SEQ ID NO: 49 - DNA, 2418 bp, Penicillium roqueforti
cccccccagattcaatcgatggtaggactgagataggatctggtgtcattgagatggtgtttcttgcctgtctctgcgtttccgaagacgacgatgatgatggaattggtcttggtaatggtgatgttgatggaaacaaaggttggttcgatgatcttgatgagtttggtgatgacaaagcttgcaaaggtggtgatgttggtaaatggatatctattgggaaggatcccggcatatgctctctcatccgatccctcggtttgttcgatattggggtcggtggtaaatcaggtgatcccttttgcatagcaataggtgtttgctgtctcccactttcttcttcttgcaactctctttctctatcatctctctgttgatcaccattatgatcattttgacgatcgtccttatcatcaatctgttggttattcccatgtggatcaacgccttgctgggtatgctcagcatcatcgtggagagctattctagcaaccgatagtggcatttgcatttgacttcctagctcagcctgagcttggtccattgtcaataccataggccagtgtattgcctctatgccgtcggtcattatgctaatcgcgtcttcaaattccagtttctctgacgatttgtattgtcgagattcatcgaacacggcatccctcacgacgtcgactcttccattctttccacctttgtgcgggaaccaaattctgtataggttcttcgacacataccccaccagatatccaatttctgcacgaggtgccatcttttcggattggacacgtttggaatcaacaattcgtgagtatgccaaacacccatatacccttatgtttgataggttgatcttttggtacttgatcccatcaggtgcggcaagtttcatgagttctaaccatggtatgatccattggttttcaatctttgttggaaccctgtttgcaatatacgctgctgcgtacaccgcttctgtccacatagtcttcggaagatcagtatcgttgataaaggttcttgccattttgacaattacccctcctgatctctctgtagggccattcatttccggtaggtctggtggtgagtgttcaataacacatccttcggcttcgatcatgctttctacctcgttgcctgcgctccgttcattgtcatagtggaaaactctgactctgacatttagccagttcttgactagagcgataaatttcctaaccgccatctgacagtcgttcttcttgacatgcgtgaatacaaagtggcacttgattccgtcaaggtaaaaatgtgttaaccaaacatgtctgttccatgctggctgattctgtactaggtcgaaatgtacacgtcctaggatgccataggtcgtgccgatccttctccgagatatctgctttggtgcgtctgctagctggcaagcttcacatacctgattctcagggttgcttccagtaatcatcacaccttccgtcatctcagagagtttttcaattctctttttcccaatgtggcctaggcgtctatgccatgtttcaagtgaggcctcagattctggttctctttctgatcttttcaatgtagcaagtgctaacgaatcattttgtgtttgagggattttaaaccctgatcgaaaacccgggggctgtgataaccacgagagattctgttcctcatgcgttttatacagcggggttccgttcttctcaatccagttcttttcaaaattcaggaaagcacctgttttcttgaacataaggttgtgagcaataaggttcgtgtggaaatttggagagtacttggcgttatacaaagtcattttctttgtctgattggtgactggatcaatgccattgatttcgacttttccaattccggtaaccgttgatgctgtatcaccgaccttgattgtgctctcggtttcttcgaaggtaacaaagaggttgcggtcgttgcagacatgaacttgtgcgcccgtatcaaccagccatcttttgttcattggcatggtttcgtgggtttggaagacagcgtctggagtttcttcttctgttgcgaagaatcccaattcttcgctttgtattgtcgcatttgcttgctgacttctgttctttctaggcgctgttcctagttcttcgtgtcgtttgtcaacatacgctttccacgcaggatcctctttcattgctttgtcccaggccttcttgtattctgggtcttggttatacccttctggcatcatctctgggtaagcgccccagcatttccacgctgggtggtcgtatttgcctctggatccacagggacattttttcctgaagaatggtgtatcgtttgtggatttagctcgtttgctatttccagttccactattctcattggtggatactggctgggcttcttgatgtccttgccagg

SEQ ID NO: 50 - DNA, 2364 bp, Penicillium roqueforti
tgctcattgaggaattcctgcgctgacttgggaaaaccactaatcctttcgcgaaaggtgttattggtaatttcaattgagacccttttatcgaggctggtgatacgaaaatcaatacgctttctaaagtatccacaaaactggcaaatgtcgactagatctatgcttcctagattaagatcctgaccatactggaacctggcgccggggaactcgataagcactcgctgcaagatctcggcaggatttggtcttgaataaagtacggatccctggcaatgaaatgagctattacctgggatgggggtttcgtctaactcaaagaaaaacatagccgacgtgagaatggtccttataagctcagctggtactttaaaatctagattggacatcgcttctagcgaacacatatcgtctaattctgggagtgtactatcgattgcctgatctagtcggagaatatcaggtgccgagatatgaggtaggtaattaagagcttctaaaaacccttgttttccgtctatagatggagaggatattatggcctgaaataaccgaggaagtgtaccctcccgaattcgaccgagaaaacccgttgaatcactcagggtagagctggaaaaccctgttccgatagataagagaaggtcgtgtcgtttcgctatgggccagatgatgcccgattctcgtaaagtaatgcctaacggattgttcgcacggaccctactatcctgcaggagaccaaatcctggcaagtgttttgtttggaagtagctagaaagtattagcgtgttaggttatgttatgacgcgtggacttataagggtgctgcagtactatatatcgatctgtcagagcctgaatgtaagtaaattcgactgcgataattggatagatgcagggggtcgacttatgtatcacataaggaaggattttctctattgtggcgtggagctagaaactgataggcggtgttggtggtacgcgggcttgttcctcggtagttggctaatacgcaggctgtactattagaggtgcgactcgccataatagcaattcggtaacccgcggggctagccgtggtaatatcgaacatgcaacgagaggggccaacggctgctttaaagatctgtaagagcctattagaatcataaagactatctgtgctcaagttgaacgctgtggcaagccactggatacagcgaggaactgggctctttgatgaacgacgaaaaatgttttgcgctaggtccgggaatgtattgaaatactgcgcgatagaagattggttgagaataatatcaattgccgacaatgcgcctgaaagatacggactgttagtttattgatgatcataaaacccttgactagaagtaatacgtacctacgctggttctaatgcacagatccgatagagaaccgataggaatgccgatatgcctttctaaagcctgtagaaggcccagttggattaggccatgcactccgctgccatctaaactgagaatcataggatttttagtcggtggtagttggcgaacagtgacatcggatgtcttgtcgcagataggacattgggtaatcacgaaatggtactccccaagcggacttggctttccgaagatcatgacataagtatcatatattgcatgtgtgcacgggagtatatgctctgggggtcgatacagatagacaaaataagtagtggtggagcgaagaccgccctatcggcgatataagtggtgtaatgactcttttcgaatcgcggcagatgtcttaacggcgctcaactgcgcaaaatggtgtacgaagcgggatgaaacgctagtaatacgggatttgagcttattatcccagatgcttaaacattgcttctcatagagtgcggcaaaaaccacggtaggcgagaatcctaagtaaattagttttttaattgggctaaggagagtatgagttaagaaatacagtcataccatgtatttgagggggataggcgtctattaagaaggccgaggctataaagttatctaaatcctcctttgaatagccaacggatgttgtattttgcgtgacctctcgaagataatcacctatagtattgttccttggatagtccctttgggctcttgccaaaagatcgaatggtggtgtatataggagctatttgtggcttggtatacgagtgctccagaatgcgctgagatgagacgctgaaaagtgtcgataactaaacatttgctcggtctggactatactgagctgtttaacgatcaaagtttgcagtggcttaaaggcgatactgtctgaaagcctgctccgtgaacgtaggtcgagaatggtaactgttctagtgtcggcttgctt

SEQ ID NO: 51 - DNA, 2230 bp, Penicillium roqueforti
aatttaaagatataattaatataataactaataatatagaggtaatatattaacctatagtattaataatagattaagcttaggctaagctaggtaattagatataaatactactattaattactaaaatagctctttataataatactaagtatacctaataaggtattaatctatataataataattagtaagttaataataaggttaattaataaaataattataataataattaatagagagataatagaaagagagagttataagaaaaagaaagtaagaaatagtaaatacctattactatataaaagggattatctaatttactattaaccctaatattaaataaactaaaggtttaggtaaaagagtatatattaggatccttcttaatatatatccctttactaactttactacctttataagctttattattaattttattattactaagactaattctattattattattattagaaatattaagataggtaagaaatagtatcttaataatactattaattaaatctagggagaaagtataaatagtatcacgattaacacttataggactcgtactttcccgtttaggattatactattagtcgtttacgtaagcagtcgtaccttccttctaggggaaatgagaataaggctttacccctaaaggggtataaaagcctatttattatttttacgtttatttcttttcttttcccttttctatacttaatattcgattaaaaatatacttcttttattaaaaggaatctagtatataatataatattaagtatctccctaaacctaaacttctaaagctatataactatatagataattattataatttatcctagtctagttttaccctacctatcctaaaactaactaaaataggactagttatagtcctagtataatagatcgctataatcggtaagggaaaataacctataatactagattatcttataaaagaagctactaaccctaaaaccctaactcttactaaaatataggacttaattaagagtattaaatataatagccctaaggagggtccttcgattccttctatctataagattatatatataactcctagtaaagaataattccttaagctagctaattaattctaaataattaaagataataactagataatatataataaaatctaggtcttaatcttagagaatagaaggtttaaggaaactattagataaattataaaagaatataattaacttatagaagaatataatcgactctatatagagaaagattatcttataatagaatataattaaactactaaagaatataataagactactacctatagagatattactatatataagtataataaccttacctattaccttattcttacttagaataaaataaactaagcttaaagtaatataccgattataggaattataggttagaagtctataaagatatctaatatactaatattaaaggatagaaaggaagtctattttaaaatataggaaatagttattagataaaagcttaaagtaaatattaattattacctattattagcctattagaaactatatatataaagctaatataaaggtaaagtatagctatatattatcttaagaataaatataatcttaaataacctatatactaatataaaagatattattatctatctctatattatctttataaatctaaattattatatagaagtatatatagcctactataaatttaagataaaatctaaggaaaactttactaacttcttagctaaatttatataatttataaaagaaactatagttattaaagaaaactataaatataacctatatttaaaacttctatatctattatagaattaagttatataggctattaattaagaaacggttccttttaatacctttacctagagttactaaaacatatcctataagattagtctctaataggaagtaaagggtattatatatacctatataataactatatttagaagtagaattaggactactactaattagtctaattttaccctatatataaaatataaagaaactaccttattatctagactattagctataaagtaagagactcttataaaaaaaggttaatacttttataagaaatactaccgatatacagaaattgctactatcacattgcctaccatactactttaggt

SEQ ID NO: 52 - DNA, 2179 bp, Penicillium roqueforti
tcagccgccgggcgttaatgaattgtgtgtgtgtgtgtaacgactgtagaacttgagtcttttgaagatgctctgcgaatccaataaaagctgcttctatgggatattgattttggcttagctcaacggatttattcggcaatggaaactggatagctggcgaacaaatggagcagtgcacgtcgtaataggcaggccagccagtgacaagcgcttcggaagcatcactgggcaaaagtggcggtcgattccccgctgggcttgcaaggtcggttgaaggtgaaaatggacaagatacggagggttcttgactactcgagcacaggtcagaatccgtatattggctgaatggtacgccttttgatctgaatgtttatggtccttgagtcagccttgggattcgtggaagtatcaaacaattaggcaattcaaacctctcgctcctgggtctagacaaagagacctcgttgacatccgcctccagtcggactggctttgactccccacttctctcttgtggcgccgtgggcgattccggcgcgttttactccttcgacgcctccgaggcttaactttcagcttgtcatcgagcttttcagcgtcggggccgcattcactgggtcgaggttggatcgcgcgatacttgggggggcgtggttatgggtgatagagagagcgcgagtggtgctgctaaaaagggtgctggcggaggttgttcgtagacgaagccgtagttttgagagccagcctcaaaagatcggtcgcccatccctataggataccctgaagaatattgcggtgaagtatatgagctcaggtaacggtaactcatgatcaaaagagaactgagctcgggtgcccctgttgatacggagtgggggctccagtggacgcacgagcttctccaagtatatgggcgaagaacaagctacttcagggtagttctcaattatgaacggtatatataatggtgggtaagaatgaaaatgatggttgcacattgctggggagtaggataggcctctattattaaggatttgggggagggggatggtgcttctttctcgctctcgcggcattgtactagtgagggctctaaccacgcgcccttttatgcgagtatgcgagcttttctattggaagctagcgtagacgaatcagactttggccttgcccaagataattgttccaagctagccgcaaattgcatctatgccgtggtctgaacattggcttatgttgtcggttgcatgaagcaggtcttctcaatggccgaacctcgttaccggggcccacgcagcaattttacaggccgttccgcatttgtttccacgtccagcggtatggtacgcttgtgtatggtagacgctttcatccggagacccacggagcattattattgaattttaagagcgcataaagtacgaagtcatacctaggcgttactaggggtaatatgtcataaggccgtcagtcgatacattccccctcacattctgatctctcttcatcgtctcctttccctagtggtaatctcgagaaaacctgttccttaagcacactcgattttccaatattcagtcttccttgaagagattctacttccagaatgacccttacatggctggaaagcgggcttcaggatgcaaaatcccaagacaatcccgattcaggtaacacctcgacagtggtgaacgggagtatccagccacgtccggagaaaaatgctatggtatcatatcctcgtgcttagtttcctgaagaatcctgttgcctttttgctaataagtttacaaggttcatcctacatccctccaggtcagtcccaagccaatttcgaatttcatcaaggagaattctgggggtcaggtacgtttggccatagaattccagcgagagcccttccatctccgaatgacctgttgctaaccattattcgttcacgcgtgacccgcagcccacccaggacgaagaagacccatccagtcaacttctttccgattccgacaaactgagacactcaggtacccatgacgcgccttctgaatatgtgtcttagatattgacttgcactagacaccatcggctgttgcggaaggagcaacggtatcaatcacaagccccagacgacatataccttcaaagactgcgaattcgatggagaatccatgttatccaa

SEQ ID NO: 53 - DNA, 2150 bp, Penicillium roqueforti
tataaattagtataatatcgttttccttataaatttaattgaattaaagggttaaatagcttctataactattaagtactaaaagttaataccttcttactatatataataaagtcgatagtataaagagtttctaaagctagtgaaatctaattttattagaagtctaactatttagactaattttaaaatactaattatttagaaggctattaaactaagatttaataaagactttacctttaaaaattatatatagaggaagtacctaccctactatatttatatatttaattatagttatttactcgcgatttctaggttataaaagtaatctctaactatagtatttacttttagttataacctttactattataattaatcctatagtaaaacctatcttatcgaagttataaatattatctagattaattctatactaaagaatggttttttaaactagattaaactactctctaataatccttaggtctttatatttcgtatacttataattataatatcttaagaattaggatataagggtagggtaccgtttaataaaatatataacctaattttagctaactgaaataactagggtagttctatattatttaaaaagaagatccgctatttcttatactatagagggccgggaggccgatctataagaatctatagagattatctattttcgaagagattcctctttaattacagttaatttagttaagttagtataagaagtcgcgtagtattatatactactaaggtagtcctaaagggttaaacgcggtatattaaaagtataggtagtagtagaaatattagaaaattcttgattcttaaaagcctagatagctaataagatcctaccctctttctctattaaatctttagaggattaagagtgttttagtggcatggtaggtggttgaattgtctaggtactaattcatggacgcgtttttagatagggtggcgggtcgtatatagtagcggcttatatatgaattacgttatactttaacgtaattcataagcgagccggccatataagtgagccggccaccccacctaacctattgaatttaaatatatttatcttaaccataatgccattaaattaattaaactaaaaagaatcatttatctagatacctattaatcttatgccctatcttattatacctactataccttagtacagcttatagttatggttctaaccctaattaagtgcttctgtctagggggtataggggtatttctgatacttctactaacctagtaattattttagaagcttcttagactaaaagaccctctatagtaggtatctaccgtttagattaggtccacttttacttcttcttcttatttttagtgtataattccttattttcctttactagtataatagtactatatattataagctagtaacctttaataagttaatttaatatatatttagaaggagttattaggctttgagattaggtataaagtaaagctttaattaataaagcctattaatatagatctttactattaaacagggtttttaaggtaaaattctagcttaaattactaccctaactaggagggaaggttagtatttaaagataaatatttagctttaaaaggacccgattaggtaaaaagggtactagactagctgccctaaagctatttttaattatcttagatttaaaagctttaatttatatagaggggtatactttaaagaagttatatttattaatatagttagtcctagtctatatttttattttaactaactagttatataactattttactactataaaataactaatattaagtggttataaaaggtaagataaatatagtagtatataaattagtataatatcgttttccttataaatttaattaaattaagggattaaataacttctataactattaagtactaaaagttaatactttcctactatatataataaagttaatagtataaagagtttttaaagctagtaaagcctaatcttattagatatctaactatttagactaactttaaagtactagttactaggaagacctttaaactaagatttaaggaagaccttacctttaaaaataatatatagagg

SEQ ID NO: 54 - DNA, 2101 bp, Penicillium roqueforti
tacttagtaagaaatttaggttatatatctataaactagattataagtatttagttaaaggatttaatagtaaattattataatctattatatatactattattcttatattaagtatagataattaattagatttagtaatagattcttatattaatagtagatttaggctaatataatataattattagatatatatagtttatagagaataatatcttccttaactactaatactattatataatctaactagataaaaataccctttttaataaaataataggttaattaactatacttatacctataataatccttaaatagtctatataaattaaactagattattagaaagatatagaataatataattatctctttaaaaaataagccttaagtaatctatagtagaatctaaagacttagaagctataccttattataagagagtattaatataggtactaataaattatagaatattataagatagaatagaaccttaataataaaattaaactaatatctctttaaatagagatattaaaggaagaaataaaggaagttttcctattaatagatattagtattattagttaagtaagatttaactatttataaatataaatagttattaataaagatattaaagtcttttaaactttactctataaaattaattaaattattaatattaaatctataattaagaaggatatagaatttaataagattaaaaggaccttcttataggaatactataatcttataaaaatattttctaagaaaaaatctaataaactattactatattacctaagggtagactataatattatccttaaagtaaaagtatagttaagatactacctattttataaattattattaaataaactaaaagttataaaatagtatatctttaataatcttaagaaaggatttattattcctaatttagctttatatactttattaatcttaatagtaaagaaactaggtagtagtctatatttctatatagatttctaaagattaaatataattataaagaaagattattacctattacctcttattaataaagtattttaataaataagtaaaataaaattctttataaagcttaatatctactaaggtttctactatattaagttaatactaactatagaagatcttataatattttacacttaatatagattatttaagtataaagtaactctatttaatcttataaatagtcttataatattctagtaatttataaatatagtacttagagactatataaataattatataattatatttataaataatattataatctatagtaagatacttaaagaatataagaagtatattagagaagtctttaaataactataaaaagtaagattatagattatactatctaagtataaattctttatatagaaaactaagttcttaggatttattataaatactaagggtattatagtagatttagagaagattataattattaagaactaaaagatactattaataattaaaagaatatagtctttcttaggattttataacttctattaataatttattaaggattatagtttccttttaaaactattatattatcttatatagtataatataatatataaatagttactagactataagtaagtatttatataattaaagtataagttaataactatacctatcctataatattataatcttaatttctagacttatatagaaatagataccttaaatagaattattagtacttttcttttataatattataaggttaataatttttagtattctattacctttttcttaaagactatataatttatagaatttaattataaaattagggataaggaattccttataattatttatatactttaaaaatagtaactagaatttaaaaggcttttttatataaaatatttcgagatccttatagattattaatctcttaaatactttataatagtataatagataaattaataataagtatagtaaagtaagttccttttatagttctactttataattaaatactatcctaggaaatagaata

SEQ ID NO: 55 - DNA, 8605616 bp, Penicillium roqueforti (residues 1-1,721,124 of 8,605,616)
  misc_feature (89143)..(89590): n is a, c, g, or t
  misc_feature (91422)..(91652): n is a, c, g, or t
  misc_feature (329890)..(330026): n is a, c, g, or t
  misc_feature (430777)..(431108): n is a, c, g, or t
  misc_feature (461660)..(461676): n is a, c, g, or t
  misc_feature (496393)..(496572): n is a, c, g, or t
  misc_feature (531997)..(532091): n is a, c, g, or t
  misc_feature (539747)..(539882): n is a, c, g, or t
  misc_feature (569530)..(569734): n is a, c, g, or t
  misc_feature (649047)..(649183): n is a, c, g, or t
  misc_feature (691108)..(691170): n is a, c, g, or t
  misc_feature (866493)..(866657): n is a, c, g, or t
  misc_feature (1032404)..(1091803): n is a, c, g, or t
  misc_feature (1092490)..(1092701): n is a, c, g, or t
  misc_feature (1210158)..(1210370): n is a, c, g, or t
  misc_feature (1240516)..(1246788): n is a, c, g, or t
  misc_feature (1247715)..(1253647): n is a, c, g, or t
  misc_feature (1258266)..(1372265): n is a, c, g, or t
  misc_feature (1374099)..(1374507): n is a, c, g, or t
  misc_feature (1457506)..(1457792): n is a, c, g, or t
  misc_feature (1505319)..(1505491): n is a, c, g, or t
  misc_feature (1513190)..(1513352): n is a, c, g, or t
  misc_feature (1624032)..(1624233): n is a, c, g, or t
  misc_feature (1669142)..(1669347): n is a, c, g, or t
  misc_feature (1761210)..(1761436): n is a, c, g, or t
  misc_feature (1817747)..(1926046): n is a, c, g, or t
  misc_feature (1933147)..(1933397): n is a, c, g, or t
  misc_feature (1963959)..(1964336): n is a, c, g, or t
  misc_feature (2150494)..(2150592): n is a, c, g, or t
  misc_feature (2196724)..(2196932): n is a, c, g, or t
  misc_feature (2250718)..(2250774): n is a, c, g, or t
  misc_feature (2391514)..(2391805): n is a, c, g, or t
  misc_feature (2493520)..(2493751): n is a, c, g, or t
  misc_feature (2532126)..(2532403): n is a, c, g, or t
  misc_feature (2536272)..(2536513): n is a, c, g, or t
  misc_feature (2786514)..(2786770): n is a, c, g, or t
  misc_feature (2859475)..(2859766): n is a, c, g, or t
  misc_feature (2873886)..(2874990): n is a, c, g, or t
  misc_feature (2881507)..(2881812): n is a, c, g, or t
  misc_feature (2897061)..(2897239): n is a, c, g, or t
  misc_feature (3050629)..(3051353): n is a, c, g, or t
  misc_feature (3057144)..(3057395): n is a, c, g, or t
  misc_feature (3069494)..(3069869): n is a, c, g, or t
  misc_feature (3075725)..(3076099): n is a, c, g, or t
  misc_feature (3305006)..(3305103): n is a, c, g, or t
  misc_feature (3318292)..(3318616): n is a, c, g, or t
  misc_feature (3502594)..(3502708): n is a, c, g, or t
  misc_feature (3537879)..(3538462): n is a, c, g, or t
  misc_feature (3783308)..(3783522): n is a, c, g, or t
  misc_feature (3992172)..(3992290): n is a, c, g, or t
  misc_feature (4005072)..(4005335): n is a, c, g, or t
  misc_feature (4027270)..(4027470): n is a, c, g, or t
  misc_feature (4058374)..(4058520): n is a, c, g, or t
  misc_feature (4267290)..(4267327): n is a, c, g, or t
  misc_feature (4352793)..(4353255): n is a, c, g, or t
  misc_feature (4361792)..(4361944): n is a, c, g, or t
  misc_feature (4393710)..(4393943): n is a, c, g, or t
  misc_feature (4451442)..(4451579): n is a, c, g, or t
  misc_feature (4461471)..(4461717): n is a, c, g, or t
  misc_feature (4481177)..(4481295): n is a, c, g, or t
  misc_feature (4533818)..(4533955): n is a, c, g, or t
  misc_feature (4590078)..(4590306): n is a, c, g, or t
  misc_feature (4668900)..(4669232): n is a, c, g, or t
  misc_feature (4737074)..(4737168): n is a, c, g, or t
  misc_feature (4766696)..(4766893): n is a, c, g, or t
  misc_feature (4834476)..(4834783): n is a, c, g, or t
  misc_feature (4927466)..(4928039): n is a, c, g, or t
  misc_feature (4945079)..(4945229): n is a, c, g, or t
  misc_feature (5082499)..(5082647): n is a, c, g, or t
  misc_feature (5112540)..(5113261): n is a, c, g, or t
  misc_feature (5314617)..(5314810): n is a, c, g, or t
  misc_feature (5372550)..(5372977): n is a, c, g, or t
  misc_feature (5458853)..(5458964): n is a, c, g, or t
  misc_feature (5480164)..(5480337): n is a, c, g, or t
  misc_feature (5535306)..(5535320): n is a, c, g, or t
  misc_feature (5567454)..(5567593): n is a, c, g, or t
  misc_feature (5598682)..(5598895): n is a, c, g, or t
  misc_feature (5726706)..(5726784): n is a, c, g, or t
  misc_feature (5743217)..(5743685): n is a, c, g, or t
  misc_feature (5807375)..(5807461): n is a, c, g, or t
  misc_feature (5919721)..(5920399): n is a, c, g, or t
  misc_feature (5921713)..(5922019): n is a, c, g, or t
  misc_feature (5942595)..(5942874): n is a, c, g, or t
  misc_feature (6011060)..(6011355): n is a, c, g, or t
  misc_feature (6324898)..(6325216): n is a, c, g, or t
  misc_feature (6397315)..(6397426): n is a, c, g, or t
  misc_feature (6604582)..(6604752): n is a, c, g, or t
  misc_feature (6843517)..(6849268): n is a, c, g, or t
  misc_feature (6859623)..(6860263): n is a, c, g, or t
  misc_feature (6914980)..(6915767): n is a, c, g, or t
  misc_feature (6919071)..(6923941): n is a, c, g, or t
  misc_feature (6950390)..(6950526): n is a, c, g, or t
  misc_feature (7009957)..(7010194): n is a, c, g, or t
  misc_feature (7088551)..(7088774): n is a, c, g, or t
  misc_feature (7280841)..(7281020): n is a, c, g, or t
  misc_feature (7435200)..(7435325): n is a, c, g, or t
  misc_feature (7579890)..(7580210): n is a, c, g, or t
  misc_feature (7597887)..(7598036): n is a, c, g, or t
  misc_feature (7639101)..(7639217): n is a, c, g, or t
  misc_feature (7648311)..(7648518): n is a, c, g, or t
  misc_feature (8007231)..(8007417): n is a, c, g, or t
  misc_feature (8052974)..(8053439): n is a, c, g, or t
  misc_feature (8129120)..(8129535): n is a, c, g, or t
  misc_feature (8133830)..(8134018): n is a, c, g, or t
  misc_feature (8188105)..(8188254): n is a, c, g, or t
  misc_feature (8239788)..(8240259): n is a, c, g, or t
  misc_feature (8245696)..(8245807): n is a, c, g, or t
  misc_feature (8304973)..(8305563): n is a, c, g, or t
  misc_feature (8313929)..(8318046): n is a, c, g, or t
  misc_feature (8345244)..(8345345): n is a, c, g, or t
  misc_feature (8407624)..(8407830): n is a, c, g, or t
  misc_feature (8424515)..(8424640): n is a, c, g, or t
  misc_feature (8481408)..(8481631): n is a, c, g, or t
  misc_feature (8596929)..(8597175): n is a, c, g, or t
gaccggacgcggtgccgccgctgcctttcgggcccgtcctacgataatcattatagggggatttcttacgtatgggttcggatgggtttggatttacaggactatgaggtataggaatgggctgattccactcttcacaattagcatctatctatatactctgggagagctcccgctcggcgttgggcttcgagttcttgcttaagttggatgaaatgcctgcatagtcatacgcaactagttagactataacaggttaattgacctttgattcatcgattgataaggctctgtgttttatgcttcttcgaagaacgtggatatataattgttgtattttctcaagaccaacaatattatctttttcggcggaaggcattgcgcagacttctgggcttcccttccgatcccatactgattctttgccagaatgtatacatttcgtgaagactgcattctacaggatattaatgctttttctgtaatgtagaaaatacctggaaatggttttcatacaggatttctgacagcagggcatttaaagaagtgtgaattgggcctttacagctatattatttgtaggcgtttacataaagaaatatatttgcgacagctgtcattcgacaatatatgcgaccgatgttagtagcgtcagtcacaagaaataactctgtaggcaagggacgcggcagaagaagtttcagctagcgcaacacaggcaatatatgtggatattgtacgatgaccaatcacctggaagcagatttcaataagatacaagatgagatgaagaaagctcagttcaactcgagagtaatagatgttttccactcaggactcgcatccagtaacagccatgcagccagcaagcaagacctcaaagaatcgcactggcaagaagagcagcaaagctgccaaagaggccgcctaatcatctaacaacgttgctaacctgttcacataaactctccacacagtacccattctcagtcccaacctctggacataaggaattggatatgcggcataggtttagatgactatatggtttgctctgatcagctttcatcccaggcacggtggcaaaatcacaagattaccatcaagacagctttgcagaccgtacaaatcgacggcttacggtctgagaggaagcaagatgcagcttgacgaaggcagtaaggccggggcccggggtgtcatcctggaaaacaccatgtacctaacctctcaatgcaaattagctaaaaggccatcatcatcaatcccgcattgttaaagtattacaagtatgaggtataatattgcatgtgaccagcgtttgtgtaaggaaatgttgcaagtgtatggttacagtcttttaaatacgtgaggggaaactcgcttgtgttgagagggttccaagaatattgaaacgcacaaacgcacaacgacaagtgagcagatatttcatccagtgcaatcgggccgaatcccaaacatgctgtgatacggagagcatcgcatggtttctattaggttgggtaagccaacgactaagtacgatctagtacaggagttgttgggagtacccaagtgtgcagaatggtccgtaccattggcaccagccccaagacctttggaaagccaagcatggatttcgacagatcataagttttaacaggcgttgaactgttgatgcgcgatggtagatggtaattaattcgctctgtatatttctaactactcccatataccctgatccatcctgatccatcctcattcatcctcggaaaatctactgtttttaatcaacctggggagcaggacttgcccatcggaggctctgcgcaagtactctcccaacaacacactcattcctgcttgttcggcagcattcacccactcgtcgagtgaaacgacctgaaactgttggcccgagctcgattccatcaagggcatgatttcatcacgtccaatcttcgtctcgccagattcatacaaatacgtcacagcctccgtagtggcgataccagattggtaaacggcctcgaggagttggcgtgcggccgactgtacggaaaccagatcgaagactcctgaccatgagctcgagtctggcactttctgggtttctttggtgaaccgcatgacattacccataagatcaagttccggcgcatcggtaccggtgatgctcgatgggcggtgtatccataccggcagaccaaatcgacggttgacgtgctcgagatatatttcgctcacccacttggcagcgatgtatccatctgttggtcgagatggaggaggatatgacgatacagacatctcgccgaagctttcttgaccagtaagccgtgcaacaccagccgacgaaacaaaatgtaatggaatacgccggggcaatgcaagtttgacgatttctttcgtcgatgccacattgatcagcttgagagtctgatatgttttcatgaacgacacatccgcgccattgtgaataacgatgtctgcacaggagaatatagatttgatctcagattcagatagtcctagttgaggagcccccagatcaccgtaatgcaagtgaactttcgggtgggaaaatagttcagataaacccgatgatcgttttctgacagcaagacaatgaacggacaaaacgttttcatcatgtataagacctcggaggatttctttgccaaggaaacccgttgcgccagtgagtaccactgtcttgacccccgaggcgataatatgggtgctctcataattcagaggtggagtgaggtccgttgcgacttcaatctccgcatcccaattcacatccggctcgagtgcggggcgagatatatcttgaattctggccgccattccacgtagactgctggcttcgaaaagttgatacaatgccatagatgtaccgaacttctcctggattagaacttgcaggttgacaagagcgagggagcttccaccaacgtggaaaaagtcagattctgaatcaatcgagtgaaagctgctgagttcgcgtggtagtgcctgtcgccagagctgacgcaatgattgttcaaatgccgtgagggtgctgttgtccggcagctgggatgaaataaatggaatggaaagtgcgctgactgcgacgcgatcagtcttgcccgaggtattttggggaatgctttcaactggaatgatagcagcaggtttcatatgaggtggcaatggcagctcctggagaaggcgggcgagaaattgaagtatattttcagattcgtgtgtggcagccattataacaaaggcaacaagaaattgatcgccctcagattggtttgcatctaaacgaaccgataccacagcttgtgtgatagctccagctgaagaactgacgatcgccgtctcgatctcttcgatattgatgcgaattcccctcaatttgatttggttatccccgtccatgcgcccgaggagaataagaccaccatcgcgattgagctttccgcggtctccagtgcggtgaattgttgtccagtctttctcttggaaaaatttgcttgcgtaccgatcacttgaaaatcgttcggctgttttggtgccatcaagatagccctgggcaactcctgcaccaccaacgaccacttccccaggaattccgatgggaacagggttcaaggtttggtcgacaatgtaaacggagtagtttggtagtgtataaagagcttgcgcaggggatgttgatgtggaacccagcaggtcgtacggaacttcactggctgagcatgcaacactgatttccgccggcccataggcatttatcagtttgaggtctggccgatgaagattcttgatctctttgatcaacccacttggcatgaattcaccaccacataccgcggttgataagcgagagttactcagatgggagcgaccataacgcaaccaagcgagatattcggtgggggtcgcaagggtgcacgtcacattctctgatgcgatgagtcgcgtgagagcaatgggatcccctcgtgtgagatcagatgcaatcacaagggtcgccgcagagcatagagagaccatgatctgccataaagacgcatcccaagcatatgatgattgatgcaggatggtctcattcccctgcttaagttcccagacgacactggatgactgaacgtggtgaacatatgctgaatgcgcaatcataattccctttgggacaccggttgatccgctggtatacatgatcaccgctgtctgacttgggacagccatgtttcggatggggcgtgcagtagaggcgtttaggctacatacgtcgataggttttgccgtcgtatgcagaagcgtatagtcaggcatagattttgtatcaaccaataccatcggtgcttgtgtttctttcatgatcattgcgagtctgttcatccccacctttgtgtccaatggaatgtaaacaccaccgacacgcaaaatggccatgagagaacatatccagtctgcacttggagactgtaaaataccaacacgggtgcctgagccaacttcgttgcgtaggagttcgttggcaataacatcgatccgacgctggacttcactataggtcaaggagtttccatcgtggttcctcaatgcgacacggtctggataacgcgaggcaacctcatccaggcgatggacgatagtcacaggccattcatctcgcagctcgggtcctgcataataccatatttagcaaatgacctacaactagcaagggatgattgacttgcctcggcccgcaatcactgcctcttgaatgtcatctttcgaatgtaatttcggccaggtcacccgggttgctggattctggaggaaagaacgaaggatattgacataggaactgaccaggatttctgcatgctccattccatacaagctagtctgggcagacaggtgaattagcgtctcgccggcaccgacattgccaacatctagaccgagatcgaaagaagtttcgccgccgcccaaaagtgcgccatcggctacacaaccacaaaagcttcgtgattgctcgaccttgggtcgatagttgaagagggtttggcacagaggattatgagatgcggatcgtggaacgttgagttctgtcaagataacatcaaacggcacacgcgagtgggaaaacgcaccctgtgtgatgttcctgacctctttgagagattctccgaaagattggcctggctgttgagagaacctcacaggaaggaggttcaagaaaagtcccacgctccgtagtatgtcggcatccgtacggtttccatctccgaggccgatgcaaacttccttcacatcaaaaaaccgtagaagaagggtcttccagactgccaaatggaagtggaagggtgttgatttgaacatccggcaacaccggtcaattgaatccgataaactgacatcgagacgaatatgtgcagtatgggaacgaaattgagcaaccttagggcgcatgggttgtagagcaaatggaagaaggggaattgtgggtggaatctctgtatactgggctcgccagtaagcgatatctccagcccaggtgccctcttcgtattcacgaagctgccgcatagtaaagtctggatattgaagtccatcttcagaaaggggttggccttgatatgccttttccacatctgaccaaaatacttcgaagctaataccatccatgttgatgtgatgaaagccgaagattatccagtgcttttctaggtcaagcgaaagcagctgaacacgcatgacctcgccatcagagaggttgaacacgtgcgccttcatctgtttctcggcctcttcaacttctgccttgtcggagattgcaacatgctccaactgtaacgaagatttcgtccaaacgccttggatatggttccgttcattgtcagtgaaaaaaaatgtacgcagggcttcgtggtgttgtcctgtggcttttacggcatttgcaaattcttgaattctcaggcgaccagacaactcaaatgtcggtgtaatattaaatgcagttttgtcctcaacaagatgctctaggaaccagaaacgcgactgaccataggacatcggcagagtcctttggatttcacgttttgggggtcccactttgctgctgtcagtaaaaacggatgatgaagtgtcatcattgtcttcggaattcgagtctccggtaaataacgacgtcgccgagctgccactgtacgcattcgttgcatcaggaagtgcaaaatttgactccatagaccttgctctggtatctggaactattttatccacgggcaaagtgggggaaggtgttgaagggttaggctggtgcgcctgtgactttacagcctgttctgccatcacattggggatcaaagattctggcagaacttctgcagcagtggccaaaagctcacgaattgacgccgcgttaaagattttcagcaccggcatatccacccccagctccttgaggaaccacgatcgaaggtcaacagcgaccaatgaatcgacaccaagctcatccggactcatgtccaacataggcttgttgggatcagcctgaagggcggactggagcttcaaaacaaagctatctaaagacagctgttagtttcagctgggtatctaacttgggatgcctgtaccttgcaagatctcgatgacttcctggtttgaagttgcctcgaataagcgtgtttttatcaacacgccagatttccctttcttgtctgtcaccacaagtttgctagacttgtagaccagatgttgaaaaattgggttagaaacccaactcttcgactcatcatcgtcaattctgagtccacagcataactcagcgctcccgacacgctccctacaagaaagtacaccttcggcaaacacctcatggaagtcttgttcagacatccatgaatgcccgactcggtaaaggtatgattgctggcccatgttcagctctcgtgtaacgtagccgttaccgacaatcgcgccgatgttgatcgcatgtgctgccaatccacggtttcggcgttgggctgccagactcgccataaacatattcgcggcattataggcaacctggccagggtttcccgtcatcgcagccatcgacgagaagaaaaccataaattccaacgtgtcctctgggaacaattcgtccagtaatatactaccttcaactttaggacggagaaccttctcaaggcgagggagatctaaatcaatgaacattgtgtcctggagcaccatcgcaccttgtgcaacacccgcgataggaggcatggtttcgctgatgttacgatgggttgcttgaacagattcccgattcgttatgtcactgcatgtgttagccaggcgtgagtgattggaaccaaacaagagcttacttggagaatactcggacagtgcatccattcgcagccattctctgcagccattggtcatcgatctttgggtttcgacttgatagcgcgatgtatcgtgccccctgtccgatcatccactggcaaagcgacaaaccgagcccgcctgttagtccaactagccagtaagttttgtcctttgagaatttgacagctttggtagcagggcgaacttggacagcaagctgcgattgaccccatgcaattaaagactggcccgcaagcggagattgtgcgcgaatcaggtcctcaagtcctagaggaacaaacttgtgcatattaactggcatcaggtcgtattgtgctctcgcccaggtattctgcagctgcatagccaattggcctgtatctgaggtgtactgagattgagagatgtttgcagtcaaagtgctctcgctctcaaaatgacagtctgtccgcaagcatgtcctcaggagagtagtcacatcagagctgccactcatattgacaaggcgtgaaatattgccaggtagcttacttaatacttcacgccgggtggagtttgggtggattcggatccatggccatgagcaatgtccttcctttgttgtcaaaaggacaagttgcacacccttttctgctgcgtatttcgtaaggactggtgctagcgagaagccagggtctaacacggccaatattgttcctggttgaagctgttggagcatagagagagcaaggaaatgggaatagagggtgagtatcgatcgaattcctagctcttcggaatctccacatcgcaccgtcaggccatgtggcacacgaacttgagagtccagagtatgcgacagagcgaccacacgctcaccattccacttattcttcccaaccagcaagaaataattgtccgttggagtgatgcggacggcacggaggaaagagtgagccacatcaatatgcacatcatccgggaaagagggcgagtcttgaaggtccttttcttcaatttgatatccaatttcagttggtcggatggtcaccacggattttttacgttcaacctctttaataataagacgccttgaggaattgtatcgatcgttccgaccagagttcaggcggaatcgaggaactttgaaattcccattctctagcagcagctccctctcgttggaccacaacatcccatcgagctggccactctgatcccaaatttcggcggcttccaaatggagcagctttgtagcgataatattggaatcagcgtcataaagcgaacggaggttcaggaaatggatatggaggtgagtcatctccatggccaatgtgcgttgaactcctgtgaacatgttgccatagggattctctccctgggcaccgtgtcccacccacagaacattcttgctttgtttgaagagctcttggaatgacctcagattattaggagacatgtgcctgagaacaggcccatccaattcaatcagactaatcactgaccccattacgggaagatttgccgagacgaggtcatctaaagagccagctgtgtagatattgctgtagtggggacggaccgcagtcttcatatcggctacgatatcagcagtcaaggatgttttccctccgatgattgtcaacgagttcacacctagtggtgtatgattcgctgctaggggatcacgaagaaaattgacgcggtgatcgacagcttgggtaatcatgacggagaatggcagaggcgaggttctggaagatgacaacaaggcttcgaaaccagaaaatcctgttttttgcatcaatccttcccatttctcctccgatatacaaggggataaggttcgtccctccttgtagcctaaccaccagcctggtaggccaccaaaaatcaacccgaagcgcatgacatccgagtcggtgagttcgagcataaccaggtacccaccaggctttagtagccgtcgaacatttgtgagggttgactcaagatttctggtggcatacagggctagaggagcaatgacaaggtcaaaacaaccctcttcatagtcttgttccccgatgtctttctcgatgtccaacaacttgaatgccattctagattggtaatccgagaatctttcacgcgcgttatcgaactgtgagtccaaaatatcggtatatgtgtatgatgtaaatgaggagcccattgcacgaaggactcgttccgaagtagcgccggcgccagctcctgtaataaattagtattgcacacaatttcaaatctgtgtggactaaccaatctccaaaacattgacatgggggtatctatggccgatctgacgagccgtctgtgcgatggtttccaagtatgcgtctattccaagtgttttggcgtaaaattccgctagcatattgtcgcgcatcaggatttcaagtaaattctgatctccgcgaatgacagcaggaaggttctccccaacggaacacagtgctttgatgtcgatgcagtcggaatgactatgtagatcagtcagtgtgattcaatttcagtttgttaggtaaacaagagttcaagttctcaccgattcagaattggagcaacatcgtccatggtgtcattggcccattccgcctttgcgaatttatgttttccattagcaacagaggttgtacaatgctccacatatgagagaaaacgtgtatggtcccaagttgcatttgcatgatcgaagtcctggagcgaattttcaagttttttcaagtagaaatgtgccacgcgctcgagatccacgcctagggaaccctcttggggaagcatgccttcagctttcttaagttgtcgcaaggtgggtctatcaacatcccataccacttccgtgaaaaagggaacatcatttgatgatgtcaatggactcaagggtgtggtatgaagcccttccagttgaaccaaagtatgtctcccgtctgctgaaaatatatcaacatcgccagagagttcagcaaagcgggcatccgtgaccgcagaataaaagggcaaatctgtaccacaagcaccaagagcgacacaggcggttggattgaggcgaagcctgtcaattcgagtgggaaggtaaagggtgcgcaagcgtccatcacctggaaaggaataagcaagcatgatggactgaatagctccgtcaagagaggctgggtgaatgatcaacggtctttcagttttggaatccaccgggacagcaatcaaacccgatgcctcgtccatttttctgcgcaagttgaaaagggcctggaaggggccggtatagccaaacccaagctctgaaactgaattgtagaatcggtctgcttccagatccaggaatgagccttgcgggtgggcgtgtggtgggaggatatcgtgcttggggtcacccaaaataatttgtatggcggcagatgcgtgaagagacatgttggatgaccccttattagcgtcagaatgacaggcaaaggacgcagacacgcaatcggcctggacttggtcgatggaaagtctgaaaatcgtttccactcccccgttctcttccaataccaatgcctgtccgatgaccacatcatggaagtcgatcagttgcacagaacccaggccatacttttgaatgatacactcaaccgccgccgatatataaccagctgcagggaataccatttggccttggacctggtgatgtgccagccatggaacctccctagggtgaagatagttgcgccagcgtaactcattgtctgtcccatcggggcatttgacacccaatagggggtggaatggttccttttcagtgcgtattgcggtagatgatcgagattcgtgccaataaacccgatcatggtcccacgaatacgatggaaggccttttatgagctctggagatcgagtgttttgattttgcattgctttcatctcaaaccctgcgaagtccacgacaccctcacccaaggcaatccatagggcgcctagggcggatgagaaagcctcgctgtccttttttccacgatttagggtcccggtgtaaggcaatgtctggccagacacttcttggatcgtctgcattgaaggtcctttcagtgctgggtgaggaccaatctccaaagccatgtcgaatggcccagctgcaccaacggcataagtgacagcctgggagaatagtacgggcttgaccatgttattgctccagtacgtgtcggcaagattctcatccacgctgtcaatgttttccccatacacactagaaatccaggtagcactgccactcggtggacgctgaactgttatgccgcacgtgcggatcgctgcgatataaggagctgcgcaggaaagcatgtgatgtgagtgataagctttgtccactttcaacaagcgagcaaattttttctcatcttcaagaatttctctagcctcatcgatcgcatcggcgtccccggaaagtgtgacgctggcggaggagttgctagctgccacgcaaattctgttctcgagggacggcatctcgcaaagctcctttgcatcctcaaatgatgttcccgcggccatcattgcccctatctgtcctccctgggaagttgtatactgaagagaccatccgcggtaataggcaatgcggatagcatcctcttcgttgagataccccgcggcatacgctgcggcaatctccccagacgaatggccaacgacagcagtgggtttcacattggctgctcggagaagctgaaccaacgcaatttgaatcgcggtacagagaggttgcgaaaacgccgcctccccaatacgggatgaaaacttatctttcacaagctcccccctcagcgaccaaacagggcgatgctcagtgggtaaatcccgcaaagaccgatcgagtcgggcgatacaatcactgaccattggcgagctttcgagcagttcagcacccatccttgcccactgtgctccttggcccgtaaacacccaaaggagtttcggttcgaggatacttcctgtttgcgtgcttggtgttattgccaaggacagtactgcttcatccagccctgcagcaagctctcctaggcttgatgcagacaccgacaaacgtactggcagagtggaacgtcggcagttcaatgtccatgacaaatcacggatattgacatccgaattatttcgcaaatacgccgagtatgctgcaatgttggtgagaagcgacttttcggaggaggcagagaaattgaatggtaacactgctccggagctgtcatctgcagcgttctgaccacaggcaagcgggcgcgtatcgaattcttccaaaattgcatgcgcatttgcgccgccaaagccaaagctgttgacactagcacgacgaggggtgttctctgaaagctgcggccattctttcgcaacttgaaggatttcaaggtcgttgtagaagggaagtaccgtggaactcaactcattgagcaataggtttggtgggatgacagcatgttgtaaagcaagtgatgccttgaggaccgctgctaatccagccgtgccctcagtgtgcccgatcactgttttaattgacccaacatacaaggggtgctctcggttactatcgcgctgatacttggctgcttgtccaaagaatgcagtactgatggcctccgcctcgactgggtcacctgcaggagttcctggttcggtcagcaaagccctacaacactcggtttcaccttcatttcagttataacttaccggtaccgtgagcttcgaaatattgtggccggtcggtggggttggaaagatctagtccagctcgggcatacgtagtccgaataaggtctgcttgagccatagggttgggcatcgtgattcctttggtacgaccgtcttgattggcacctgtctctcgaacgatgcattcgatgtgatctccattcgccaatgctgcacttaatggtttgagtattatggcagcaattccgtcaccgcgtgcatatccatctgcatctttatcccacatgcgcgagcggcccgtcggggagagcatcttcagcttgctctctgcgatatattgctccggtccaagcagaaggttggttcctgctgctaccgcaacatcagtctcgccacttcgcaggctctgtacggcctggtgaagggcaatcagactagaagaacatgccgtgtcgatggtcatggaaggtccccgccagtcgaaaaagtaggacactcgattggatagaatgcttcgagcagttcccgacgcaaaataagttgggaagttctgcacatcccgacccaacatatccgcatagtcattggtcatcaaaccaacatatacgccggtgttggacccttgtagcttttccatgggaatgccagatgtttcgagtccctcgtaaacagtctcaagcaagagcctttgttgcggatcaatcgagtttgcttccactggcttggttccaaaaaattgggcgtcaaacagtcgatgatcgtcggacaacaaataggaatgtcgaacattcgttgtgccatggtgaaggccatcggggtggtaaaatgctttggtgctaaaacggctttctggaatctcgctaaggacatctcgtggtgatctgagcaagtcccaaagtttcgagggtgttgttgcatcaccaggaaagcggcaggcacttcccacgatggcaatcggttctccggtgtgctgaagaccacctgtcattgtgtagctcgggtttcactgactctgcacaggctggtacgatcaatgtgtgactccgcgtatttctatgaagggtctataggatatcaatcatggacaatcgggacaagattttctttgcaacattcacactctagttagcagcgatggggagcggtacatatcattgtgccgatgctcgccttggttgtcagattaggatagttcggacatccaatctcgcatcagcttgtcattgttttcagctggttccgactccgaggcctgtctccggggttgtgatgtgaaacgagacaaatcatgatgtaggtatgggatccaccgggtttttgccatgtgtgcagataaacttcctgtgttttctcacttcatgttattctagaaatctagaaatactaggcttccaggggtttgaagtccggctagtttgaaatctcaagaccgagtccgagtccgagggtcattgccctgttgcatttgcatgttcgagatctcagcaagaccatcaaaccatcgatgagtcgccagcatggcgtgcagggatcgtaaatatttgtctcatggccaatggagtctactatattgcgatattgcacaacaaggatccaaggagaatatgcgcccgactactctttttcctaagtaattagcaatcggtaggttcagcatcatgcttcgactccgagatcaataacatacctagtccatgttctaatactagaacccctttttcccagatcaccactcttaggttcgcaaccacatttccatgtgccatggatcttggtcggtttgagtcttgacctcagcatattcgagtttcaactcctaatatccgatgatggctgcatattgtaatctgagcggtcagcacgtggaaaatggacgtgctctagacagtttgtgttgtctgcttccctatccctctctaggcaggaggtaaaaatattccccaccccgccctgtcttggtaatgctgcatgcagcagctaggatcaggataggcaggaggtgaaatgaaggctcgctggggacaaagcgcacggaagaggtggggaaatagaaggacccttggaaggtagttacctaagagaaggctgctgactcaggtatcaactgtggcctgaggcctctatttctttcacttatcggaatgaactgcccagatgggaataagacactctaatcacttgccaatagtatctttccattgcatacattggactgcagatagcgactgtactcaataaatataaacaaattcatcattctcccggtctgtcagatcctgaaacgcattgtccccaacttgcacagtctcaagtccagcttcctcgatgttatcctgcatttcgtgatagtcattctgcatcgaaacatcaactatttctgctcttttgccattttgtacacgtcgacgggcttgttgtttgttgaggaaccatagattagcccactggataagaacaacagcggccaaggtgctgaagattccgagacatgcgcgcaggcctgggtgataggctggcttatctttctcgttgaatagcaacgggccaatgatatttcctgccgagcttgctgcattgtacaaactcatgataacggacttcttggtggtgcctgccgtgttgccgatgatccatgtcacaatcaatggattgccgccaaataagaatgcgagtagatagtagccagcaagtaactggccctgtacagagttggtccgagccaccgcatacaaaattgctagcccggctatcacgggcagcatgaaagctgcgatgatagcgctcttcaaacgagcggtttgggcaagataacttgctagcagaatgatgaggaattgcagcgcgccaaatggcatggtcaacagagtggtcctgtacttatcgtagccaaggccgctcaaaatcagtggaccgaagacgttgttcacgctagcgccaatgttgaggagcattgccattccaatccacagatatgttttgggctctaagcacgcctcgaggacgtgattaaatttaaactcggtgtttcctgttccagtctggttggctcgaagtcgctccattccttgggctttctcctcctcggtgaggaaccgagcggtcgagatatcgttgtccaagcgccagtagacgattggggcagatgcgacagttatcaggccaacaacaagaaatatgctaaaatcaagtcagaatataccactctcgggggttgattggtttgatttcctacatctgccatgatttcagcacgtctgactctatttgtgccagcccgtacgatagagcagctgcaacgacggttgctaggccatttgtgctataccatgcagcgatccgtatcggttgctctgcacgacggtaccattggctcgtgataacaccaaagagagggagacacccggcctcaaataggccgagaaaaaaccgagcggccatcaaggagccgaagttgtggcatgcagccatgcatgtctgcgcaattccccacccgaggcatagcactggcataagaattttgtgaggaaccttgacaatcaggtatgaagaaaagggctgccaggcaagttgtgcaatgggtccgatggagccgacaagcgaatattcgttgccgacaaggcctgtgtctttctgtaaaccgaacgttgcaccgtatcccaaaactgtcttatcgaggatctgcaagaagtagacccaggcaagcacaacaagaatagtccgatcggtcttgcgacagatgcgcttgctgtcctcttcggtcaaggagacacgtacaataccactgttatcgatgagtttgtcccccttctgctgctctgcggcttcattgtgaacaacatctggtttggacatggtgggttcttccatcgtaggagaatatctataccatgatcgtccctatcaaggcatatatatacatatgtacggagtagggtcagttgccgcgcctcacgtcattcggtgaattctaggtgtttccccatgtttccccccacgtctccgcatgcccccacgaaagtctaacgcgcgcagtccacattcgccaagatatttagcgaaccaacgttgccggagattgattagagtttcctgtgtcttccaatcgattagaatatccttgccactttccatggacaacgcattgtcaagcttcggggtggagatccctattcggacatcccgtgattaccgagcctaaccgaaactcggggggtgggggtgagcccttgccgagggggacaggaatgcaggaatgaggccataaattacctctgcactttcttatttgacagtcggctaatgggagaattgtcggtgactgcgctctattgccgttgtatattgttgcaacgggtaaagaggtaagatgccgaagactgactgaaatatgtatctgagaaataattggcgcctgatgagttatttttccctctcgccggcagacaatatctcaagatattgaacaaatatgctttggattatcgctcccagaaagggaaaatcaaacgccgattactatctccacgcctagtttagagccctggaaagagcgaattcaagaaaaagacttccccaaatggacgacgcatgtcggcatatctacaaagcccgaaattcatacatttggcgcaaattatgcaacataccgcgaagcatagccacctcacctcccatttaacgtcgaaaaaatgttgatcacgttgatacatgccggattgcgagagtaccgcgccctaatctttgagtgaatcatgaccccaatttttgagcgatcggtaactcttgctattcgtgtcgtacttggctcgctcctcttgcgctaaatgacgcttgcagtaggataccacgcgacgcatgtggtcaatgtcttgatcgctgtagtcggacgggttctcgttgggattgtgctcgaggatccgcacaatccttcggccactatcactatgattaacgctcgtttcttttttccaaccactggaactctgcaatcgagggcgaccaaagtaagaattactgacctttcgtggccaattgtttccccggaactgcccgcccaacccgatgtttgtgattgctcttgctcaagccaaccacgaagctcgattggggtcatgttcacgagatcgttgaattcactgctcagtttgtcaaaaaaatttgtttatcaaagctggcaatggaaagatacccaatcacggtgtctctgtccttcattgtttccactgatgaatattggaattttggttagatactacgagtgatggtaatcactattggcacagtggtgagtgattttgctaatttgaagttcagtttgacgtcatagcggcggaagcatgttgctatgtcacgatgacaaggctggttgtagatacggtggacacctggaatcatgaagcagaattgctaaattcttagacaaatcggacctgctttctaaattgaacgaaggagattttctcgcgagggcaagtaaagacaatgccattaccacggccagaacaatcgaccatgcagatgtgcgcaattaaataacaaagcattgctcctttggttggaattctgatcgctggccatctcatatcgacttagatgtgtccaagcccattaagaatggttggtctccatcgctttccttgtcttttctttttcctaaatctgacgattaaatttaaccaactatgcagtcagcgtcaatcatttgaataaaagatattctgaattaacccaccgaccaagcctgggaccattgctccactgggctttgatggttctcatccttttgaattgggcgaatttgttgttttatcttgtaataatgttgacggtaacattgccgcctcgggaagtgatcggctcccggattccagggtgagttagtcaccccgccgccctaagctgcccactgagcgaccctgagctgctcagtgagcaacctgatcgctcaccccggtgctctcccttcaccctccgtcttgccttctagctttcgcctgctccgatggtaaccgcactgcctaccggtgttcctgggagttctggtctggagatgacgtattcccacgtcgctacagtgacttgctgtcctcttcgaactttccatcggttgactcgatcccttcggcttgcatgagatattcagtaccacctcacctctacaccctctcatacgttctctcgctaacgctgccgacaccacccagcaaacgatccacaaaaattcaccgttgtcctcgttcctccatttactgtgccaatttgatcccaggaacaacattcgcaccagccttcgggcaacctctttttgtgtggtatacctaggtctcgaacaactcgccgcgccgtgtgacgcaagtcgacgacatcggctgacggatctagtttagtttcgggctagatatctgccactgtgaatgaattaagctagcattcctaggaaccctttcctataactgatccctcgcacctagaaatggctctgcgattggctgcagcgaatactggggccttgtcgatagatccagaatctatgccgattctgtcaacaattcgctgctctatctcacgggctgattgaaacgatgaatcgaaacaaataaatagtcccaactatccctcctttgcagcgtttgtttgaaatatcatcgaacgtgaattttactgcctcctgctttgattcccattcattcagaacctcttgaatctacctaccatggtaacgctgaaccatcaacgattttggcagccattaccaagagcttcagtgagacgctcttcaaccggctcagaaacccagactaccgatgtagtgaggcaatcggacgccccagaagaaagaaatgaagcagactacaccctggggtgtaatgtgccacaagaagaacgcagtacattgagtctcggtaagacatattttaaacaccctcctcccatgccccttggaattaatacggtctctccaatcctagaacccggcgagccccctcgagccaattcgcctgaactctatctcaatgatgcagcatcagccgctggaaattatcctgactaccccgaggaagtcgctctttatccttcctcccgagatactgcctccgtgactggcttagaaggccctggtacgacgagagtcttcgatgtctttgaggacgatggcaccagacaaagcgatggggggtattacagagattgtaatccaaacgaaaggaagcgagctttggaatattcaaaaacatcctctccgaaacgatgccggcaccggacttctacggtcacaaatgcgaacaagccgcgaggaagacgagcacataaaccaggagccggaaattcgccaagcgaaatcacagagggcgattccgcgggcaatcttgcaggcctaaggaatgcgatcggatatttgaagcgcgcttacagtgtagtcactgctgaggccaaattttctgacgacctcacgggtgcaggaattctcaaagagaatcttgcagtgcttcagcttgcaacaaaaacgctacaacacgcatacggcatcatcgcaacaagcaccacagcaatggaaaattcagtgcgagaggctacgactgtaaaaccacggccaggttttacccgcaggaagtggacccccgaagatgggcgtcgactcttgaggttgaaagactctcaaaagctgtcatggagtagtattcgcgattcgttccccgaaagaactatgaatgcactcaggagccaatactctcgggagacttccaagcatttggaagctttttcgagtaaggagagccaatcggtcagcgctggtcggcaaccaaagtacacatcaaagatccgaagaagccctaggctaggcaaacctcaccaggtcaaaagtatgaggagcgaagtcgagcaccaccgaaggtatccctcgcgtgcaaggaatcattgcggtgataatgcattgaagttggattccattgatccccgactccgtgacctcggtaatgcctaagtccgccccactgtatttttttctggtggtaagaccggcataggatgtttggacagcaatatatcttctgcaaatgcgaattacggtcaatgctacaatgtgattagagcagaaggttctgtttccggagttctttatgtagataccgagcctatattcaacgagttgagacttcttgcaccgattacatgatacggttttttggtgcagtagaagtccgtatagggacctgctagagcttacgtagtgtagagactggtatgatctcttcaatatgcacaacaaatataggtcaaaatcttctaccttccaaaattggcgctagagacttatacctacgaactgatcttggaaggcgattgactacaaagaattatgcagcaaacgaaatgtatatgcattgaaaggtgacattcgagctggccgtgaacctctcacgtgtttttattagcttccaataatagcagatatcgtcaactatctctaccgagatgtaacgcgcagaatgaaaggttgtttgcgatcctgggaacacttagcctcctgggagtgctaatagtcgctgtcagggatatactttaagcataaaggatgcatggagatgatctgcgggacccacattgtgcatatgggttcccctgaacgcgaggaagcctgtatctagagtcagctataattgttcaccatattggttattcatgacaagacacttccatctatacgtatacgagagaccctcgcagtcgctctcaggaacacagtccaagtctcccagaagctgatcaaatgcatccacgctttcacttcgtaagactccttgagttccgggttcttcctaacccaatttgaaataatgctcatgagaagcttatctgcggttatttaaaataatgcctctcatggtagaagtgtttcagaatatacatatcaagaatctatggagtaggttcatatttaggtttttattaatccttcagcagagacatgggcctgtgctccccttgaggactttgcccctgatatttaatggctagctcgtccatcttcatttgaatcggctcagggtgatttgactccttgttctgtgagcgtccaataaacttgaattaacgagtgaaaacaagaggagcagcttactatttgttctgtagatagaggccactctttggcgttcgaagtcaacgtgtatagttggcctgtcttcttcattcggagaacgaagtggatgtcggcatcacattctgtacaatactcgaaaatcttctttaatagtgtctccctccttctcagacttttttgatttccccttctggcatgagatgttttgaacttgctgttggcgatatttgtaggcaatgatatgtttaccaccggagagggttccatttgaattctatccgctggcatcggtcaggctgtaaatactttttgttacctaggatatgatttaatataaggtgcataatgtctctccggctcaactaacaacgacaatgacatttattagaattgatttgtgttgatagatggatcctgtggtaaagcaacttaagctgtcatgtcttcaacgcccatgacttccgacttgaccaagcaagtacccgttgaatttgaacttcatttagcaaaaatcacttaaacgagggccataaaaccatactattatcactttaagggtttatattagctcagattgaagataggaagtgacagaaaggcaaagatcgagccccatttgaggtcaaccatcacctgctctcatgttcggtagataacgttcaaatagcacttgtatgtacagtaccataaggacgtgtaaataatcttctagattgagctgatatccagggtcctgttctctatagagatatgactgcttgtatgtaatgccatgtgcctgtgctattgctatccatgtcaccatgtgtcctcttgggtagactctagaaaattggtctgaagagccacattagaatactcaggattaataatcacctattgctactagagcattctgcaaaaataccatcttggaaatcatgattgtagccccttcactgtgattcacaagtttaattccgctggtcttgccttgaatagattgcatgtcagaaaattattccgcagtgacagcagattctattaaatgacagttattcaagtggcaagccactatttgagatagataacgccaaacttgagtttctataacctctcaccagaggtaagcgaagtgggatggaatggtttgacgcgtcaaacttttagcacagcctaggctgcactgtattcagaatgtactggaaatccggtatcgattgtcatttgtgtatcgtgatttccactctcgtgcgcattactggcatagccacagcgctggtaagctcagccacaattatatagattacccccctcgtctgtaatggaaaaacccgtatcgctgtgttcgatacacaatttcggtaccaacttcagcctggttcataccatattgcaacgttgaacgtggccacactacacattacgattgcctctgaaaatggggtctaatttcgtagcaaaccactatgcctctggactgtactttggatgagacgttatgacctacgccaatgcctctgttgccgcccgcattttattttcatgtattctatccagagcgaaccgttcctagggatgcccatcagaattggtcatgaattcgtatacttagttcgtctgtcaatctagtgtatgtctctctatgttatctccaaaagagaaatgatgttcatcgtgaatcagcaagtcacctcgtcttttcgagttatcttttactacaagttaattttccactgcgctgtaaataccaatcttgtcccggcccattgcatcaccaactccaaacccttggtgtacaactttcgagaacattcccatcattccaaggggcaaatcaaggtgtgtaatattgccatgccacatcaattctggcgacctgactggcatctggccgagctttccatacatctttagcccagtcagatggggctattggtcttgtaagtcgtccgtttgcttctaatttagtgctgttgagaaatcggaagcttcatttaaacatgttcttcgagatttattcgatgtgtcactagggattgaataaacgggggaggtggacaaggggctattcaaaaccgttgaagttgggggtgttgaagagcgttagaagagacatatccccaattttcccgaggcccccagaatcgaacgcctctctggccctcccgagaggcactaaaggcgaggggagcgttgaaagttgagggacacatcaatgacgactttggcatcttccttgtggcgttgaactaggattgcttggatttgggggtaaccaaacctttgagaattcagataagtgcggtcaaagttgcactcgcttaaacaggaacgagctactaactgcgacgtttgctgtggctaattcggttctttgaccaaccggcagattgctatcctaaaggatcgccaccaccaacaggtggttaagcctcggttgtctcaaccatgttgtgtaaacttctgttctggatcacgtcaacgcattaaaggtgccagcactatcttcagtcttgtccaaggcttaattctgctaattctacgtcggagagacccggtgatatagtacctcaacggcaattatctcaccccacggtcccctcgccatcataacattctcaactatattaatcaagttctcaaatcggtcatggttcatgcccttgtggaccatccaaggtgattccgccactcggttccttgcgtagagtaggttttgatgtatagtgcggttcagcctattttgcgtagcgtacttcaactgcatcgaggaatgctgcagcccttgaaaagagagtcaatttgtggacacttaagagttcaagttcatctcgatcagtttgaacaaagccaaatctgcaacacaagcccatagcgtgattctgttacctagccttctcgcttcccctaatccacagccacttaatgattttcacgtcatataaatcatcgagatttgaccttcatggaaaggttatcaatccagagaacgatcatcacggccacttcctcaacgcctcaacagtacctgattggaccacaggcggcgaattagtttctgttgtcatatataaaacgtccattctcttctgtctttgtcttgctttgtttttctgtcacctgatacacaaaaaccagcagctcttggcccgtttagcttgggtaaggttcgagagctcctatcactcattttattaagtggagtcccagccattttcctaacatctcgcaatgtgtcttctgtctcttccacctgaattgatcttgctcgttgcaggcaatttggattcgccgaaagactttctcggcttcctcctaactagcccaaaatgttacaatctcctgatcaatgagctttatcaaaagaatgtccgctctgatggtggatcagcccttttgtggtacgcgagtcgtggggccgaacttggagtccggaatatgctgcgtgcgggtgcgaatgtgaatcttcgatcaccgaatcgggcacagttgacagctcttctggaagctgtgaagcacaagcataccagtgttgtacaaatccttctagagagtggggctttgccagatgcggccgacgcccgatccagaagacccttggctttggcgacaaatggtcgtagcgacgtggcgatcactaagttgctcttagaaaacggtgccagggccgattctgctgtgtttgacaagcatgctcctttatttgaggctgtccggtcaagccaggaatccaaagtagcattactcttgaaacatggggctgacacatacgtcttggactgtcgaaccgggatgaatctcgtgtatatcgcggcttctaagaacgctacttccggaattataaatattcttatagattcgggtatccaaatagagtctcaagatgatatgggaagaacgccacttcaagtcgcagctgaaaattcatgcacacgtgctgtgcgcctgctgttacaccttggcgccaatccgaactttaagaatatgaaccagtatcgggaaggattgagtgcacttttctacgctgcaacaaatcccaacagtcccggtaatggcaataaaagtatcatccgagcactgttcatacatggggctgagattgatactgaaaatcacgcttataagacgcctctactctatgccatctctcaaagtgctattaaacaagcgcaagctcttgttgaatgtggtgccaatatcatggctagagattccaatggagaaacggtcctccatttggctgcatcattatcaagctgctctcctagtttgatggattggcttgtcgaaaacggagctgatgcaaattgggccggcggccagcgtaatgagactccaattttctacgctatcaggaatttttatatccgataaggggtgggctgatgtgaactctcgggatatgcttgggctcacgccattgcacaagattgtcgccaaagaggagacgtgggaagcagctggggagttgttaaaggccggggctgaccgatgcgccatatctaatgatggaaagttccctcatgacatggttcctgatggcccttgggcggaaacgaaacgttccttgatccgtttttacatggcctgactaacattaccatgctcagtcacctttagaaaagctcttaattattttctatgtgcataaccattgcaggcaaatttgagagccccaatctccccatgataatgatcaccatatagactaccttggaaacatcttggtggacactgcgtactctagtcgcttgacacctttttttgacgtaaaagcagctccacgtacattgacatcaaatcagaaatccgaaagcctgcgtgacatactgcatgcggtgctgcaaaatttcaaggccattagccttatggaaggcagaccatcgtacacactacaaacatgcctagtcctgactttcttctgagtgcattagtcatgtggtttgtcattattcttggggtacagtgtcttggggaatccgatgtcaactatagttgttcttcgtatttattattcatctcaagatactgtccatctctacgtgaggcccacagttggctctttttttcctaagacattttgcaatattagtgatagacactgtcaaaaatgcgtggtcgagggtccaattatgtacttgaagcttgggtgcgtggacgccgaccgaaagctacacatttattttctttttagaggctaatgccgaagctggagacttctgggaatgggtattggttttcttgggagcacgcgttcggttcccagagggcatgtcaatggtttccaggaatggtcggtggtgttcccaggagacaatgggatcctaggaggagcacaatagtctcctggggccactatctggcgtcctggaacaatgcagtaacatcctgggactatatagtggcaccctggggctggtggacttctaaataactatgctgagatcatatatgctctgagtttgggagataagatcataacagagcgctcttacataccattctgggttgacaccctactgcaatcacaaattgcctctcgtttcgctatggtgaagtgggctatctggaaacacaactgtaatttttcttatggcacatgtgctggaattacggtgcccatactcacatttttacgtccaactcttcgtctctattcttcaagctacctgtcatggtgtatctagtaccttacagggctatccacagaaagcgccgttatcaagagcccaattggttcgctcgagtagcgtctatcaacagctccgaggtatgcaccctaaatacgctttagactgaaatttaaaatacatcaattggggtctacgcgcacgagaaacattgattgaaagcacatgtgcattctcagatcgttttgcgctggtcatcagttcctagttttctagtccataaaccaaaaatatccaatcattggcctcctagaggtgcccctttccatgaaaccgatgtggctccttcggcatagccatcccagtctttgaggacgccaacgatcccttctcggactttgccaagggcctcttcaaaaagggtcaagcgcgtgatctggttgttctgctgctgtttcaggtactctctttcccgaaacagctgggtgttagtgatacgcagctcgttgttatccgctgcaagactttggtcggcatggtgcttggaaatgcatgactcccacaggcgccgatagagccccacaagacgcgctgcttggatagcgagcttcgggtcttcttgctccattcgctctagggtttcaatggcaggttggaaagcctctgccgccagggcgcgcttctcgctttcggacgcggaggatatgaatggctatagtgttcagtgggtttctccgtaatcatatgccgcaacttacaagatgaccggtttcacactgcgagcttcctgttgctccattttcattcgtacttggctgtgcaaggttagaggcttgtatctcgtttgtatctggggacttgtcagaggtgtccatgatcgatgcttggatgcgagatctgaatctatatctcgaagaacaacgccttctttataggctcacatcgtcgtacaaaattaatttatggaccctttcttgaagcaacgatacttttcaattccgttgattgtgcatcgcacctcgcttttgttgccatactgtgtcggtcgtgatacgggcacaccactccgtttgtgtaaaccatagaagatagaaggcgctcgggtcgtcggatatgcgtatctgataatgttgtcatgtcataccaacgggggtttgaacattgttgagttagccatcattaaaaggcaagtctgggtacgtgtacaataccaccctcatcatgtgaaccaccccgacttatcttgagtattccggttccgaagagaaaaaagaatccattcactgccctcaattttgatctcaataggataggctggaagtgggctagactggtcgccaagcttgactgctacggggctgcaagaaggagattacaccaattcccggttttgctacccaacctagcagagaggatgaagagctactttcttcttataacaccatcccctcagtttttcgactcgatactctaccttagaacgatgcagtgagtatcaaaacgtaaattattgaggacattgccccaactatcgagtcggagaaaggtatttggtggtttatattgtagatataaagctatctgaagatccagaagccctgcatactagcgttctttacctctcgcactcagccgcaatggcccacgtcgcacgcaaaaggacgcgccagagcgctggcgatgtttcagaggcaacacctttgctagaaaggtcggcgagaaagacagaggggggtttcaatcagcaccctgaaggcacaacgagcaccagacgattccggactcagccatctttggagaagaaaaccaccctccgactacgactccgacaggagtactttgatcctgggtccgaagaggcttggtggacgtctctttcaacgcccaatccaaatggcgaggggcgaggacacaagcagctagaggagaacgccgacagagaacaagctcgactcggctggatgcagcgactgcgccctaaacctcatcgacgactctcttagacagaacggttgaatatggagactatatttcttgatatggtgaattgagtaagaaggatgctatgtacggagccaaaatgtctactatgagctatagtgtactgaagcggaccagatctgcctgaaaatgagatacagtatgcaagtccgatgatgattctacttcgcatgcacttttttagattctgccaatttctgtagagcctgaaaaagtgacgtcgtagaagccaagaatgactgacagttggttatgttcagatggtgatgtagagcgggaagtctgctacaaaggaattcaacagtctatactggctccttgctgagacattcgtccgttcaatgcacaaatagctaagctgccagcgaattgccgatccaagctcgattgtggtcgcgaagggtggttgggggatcgttggaggggtcatatgcagctatcctatcgcttttttgtggatgattcatgacgtatgctgttagtaggtgctccgagttcgtcaagcgatatggggaagaaaataagaaaatgaccggatctgctttgactgagaacgagctgcatgtgaatggttgtgcaatgtttcgactgtgcggtcaggcctttgatggccctctgctttatataggcagaccaacagccaaatcttatctcgtacatatagccgacacgatttggacgtgtccagctctctaaacaatctttgcttgggttggtggtcatgggatcactggtcgttagtccaccaccaccgagtggttgaaccatcgtttatgttcaatctggaggccattagctagtagtatatagtcaaggccgtagtgctaagggctgctctctttggagattaccgttgaaatctatttacccctactccaatctgttagtccgttactccgttaatccgttaatccgtttgaagtctaaccgttcggtggacttcgatagatgcttaacgaaccgtcaagcgatcttcacggatattacgaccctatgacaacttttttctagaggaaatagttagttattaaaaacgtagctgataagtctcgtatatttatccgtattaaaagaaaaagaaatgactttcaaaagcaacgaaacgcgcgccgcgatgagatagtaatgtcgagaggcgctatctgtatatatctataccttttttccgtctcagatattctatggagaggggaagctgatgaatcttagataatcgacttggccttgatattgtacctagctaagttcgcctctagctataagtcgaggacggatacgcttggttagtgacggaatctaggaaattattattgtagtcgagcttaagtaatagaaccgtcggcctatttcgggctatatatgaaaaattgggccggtcgctcgaagtagttatactgtagaccttataggaatctgtctcggggcgggacgatgatctaggggaagatgtaagatatcctctacctgctaggtttcccggtactcaataaagatataggaagatataagggtgtaataggatgaagacgggttatttatagtaaaaatccgctaactggaaggcgcgaaccgcgagctaggggttgagctcgatcgtacttaggcccggctagacgacgcgtatagcaaaagcgatcgattctaggaaaagtctcgtcggcttcgagctgaggttaaagctagctcgctccgggctagtcggctagaggctgaattgacgcgtgttagagcgggagtcaccgaggcgatgaaggctttataaagccataggaactataatagtagctcgccggcgggagaacgcgatagggattgatgtcagggaataattcgcgaagtggcaccgtaaaccttgaggagaggttctaatagaccgacttgctaacacattgttttgtttttttatgttctgtaagcacatcagatgcgagcatccgtaggaattcccacttatcttatcgagcctacttatcttatcgtaacctcgataagtaggagtgggtggatcccaagttgaacccccataataggaaatctcatattgtttgtagtgaaaacacggctgtatcacgaccatcacgcgtttttacgcgtcggtaagctatttctggtaatatataagtctcctaaaaaggattagccgcggatgagctgtgattgaaacggcaagtgtgcgtttggtttcttagacagaaaagtaataggagacgactatagatatatatatgtatatatacttcggattaagagaaaggttttgtctaataatgccaagccgtaggaagtgacctaactaataccttataacccctaaaaaccaagccgaaagaaacctcgtagggaatttactctagtgattaagttgagcgatatccgaaagtatatcagaggtctctacgtagacaatcctaatacggttagatttacggtaaagacagctatatctacgcgacgggatttcccgcacggatactaggcgcgaatatcatgcgcttcttatgcgtagccgagaaaatcaagttcgtggtacgtatctttgtttactatatttactagtatttttaattcccctttagcccctaattgctcgaagaatttactctgcctggtcagccgtagtctcgtataatagataaggtaggattatacttactcgtagcagcttattaaccgatagtcggtttagatcttccgggagactctaggcctcggggctctattttgttcctagagagcttcttattattaagctttagactatattagctagggctattagctttagagttgcggcgtctatctcggtcgcgtcgatttagtaactatgctccgcccccgctatatattcctcgttagtattacctcccgaaggtattcgaaaattagactgctccgtacttactaattttaacgataccggactccgtaagaaagatcgtatcggtacttaaggtagctagtactctgccctacctacggagatgctttattccttttaggacctaataatcattagctattagtttcttaatagtagcgaccctttccttcggaaaggggagggaaatagcccgtacgccctatacctaccggctaaacaatcgcggtgtaacggataaaggtccgtacaagagggaaacacatgtaaacctgcacaggctcgggaaggaacatctatgtcatcatacatctgtttcgatgtcgatccgtgaggggttcgtcacatgaacataggcagatagatttccttatagtttaggaccccccaggggcccctccgagactggcaagaattagtcttggcacaccatcaatacattgtgttccctccacaaagccctttgtatcttacccggttgacaggccgtacacctacataacgtatacctttacaattctaattcttcttcttcaactgcctgagatacaatggctccctcaacccgtcagcaatcccggggaaataccgaactccctgagaatcagccccgatcgggagacgaaacggagactactggaaccgaacaaacggaaccacagacccagggaaatataaccaaccctcccgaggtaaccgcggaaactacccgactcatctaagaaaggatccgggtcctcgaagccgaagcggtacttcaggagagacttattactaccgaagaacttatcgaagcaaaccagagaaagctcgagagttaccaaagaggaaagaagtcgaaccgacctaggaacgaaggtgattcgacatcggagagcgagcgcagtcagaagggcgagatcaaaagagacgtcgcgatattcgaaaagaactatagtatcaaaaacagagaaaactggctaaacgacctcgatgcccttttcgaaggagccccgaagaaatacatttcgggaaaacagaaggttttagccgctacaaatttcctctgcacagactacaaaggaaaatgggtgattcataagcggaactaccccggagacgcaagaaactgggaagcatttaaggattagaccaaaactctactccaaaattcccacaatattgtcacagatatcttagtcttattcaataaggcagagatacacccataccaagacccaggcgtcttcgaaacctacctcgaatcgctagagcgtcacctactagaaaccaccgaagagcagaaagcacaaaccctctttataaaattatagaaacctctcagagacgtaatgatcacatctagcaacggtaccttaccgaagactagaggtaaaatatcgaaactagcatctaccctgttccatgtccattttccaccttccaaaagaaaggaccaatcacaacagccccagtccaagaaacgaaaagaaaaccctaccaaaataacctcgaatcggtcccaatccggctcctctactaccaacccgaccactttcagaggaggacgcagaggcaatcgcggcagaggaaggggttaacacaggggtcgtggacgtaggggacaccgaaatgcaaaatcaaatacctcgggagcaaacgctacctcaacaatagactaaggaaacagcaccgaagctgccgcgacaggggcatatttcttttgtggagataagaatcactgggcaaatgaatgtccccagaaagctatcgtctaaacattagtttaaacgataaaagaaagcaaatcccaagcatcagggaaagtaaaagagctagagtaaatcccagtacctcagctcaatatccactcattaggactgctacacgcttacatatgccgattacccttaaaaacagcgacgaaacacatgtggacctagacactagcgcggaatatgatatagttagcgaagaattcgctcacaaccaaaagcttcctcctaccccattatcctctctatcactaagaggaattgccctagaaaggctacgtacacacagtatatactaggtcaaattcactatcaaagattccaggggtaccaaaaaagtcgtgaaacggccatatattggtatcgaaagagacccacgtctagagggaagccctatactcctatccagaacatttattaacgaattcgatatcatcctacaaccgagtatagatcactagtggttcggagtcaaggctttcgagttaatgaatccacacaagtttacaaaaacatcacggaatatagctatcatttataccttagttaaaatgccggaagaaatctagttaccagacaaagatagtaaccatcctcacctcaatatatctaagattccacctaaattagaggcgtatcttaatatattcgaccacaaaaaggcagggactctcccgcgaaccaagtcatccgaccatacaattgagaccgaagaaggtaaaacccctccttatagaccaatctatcctctctctaggacagagcttaaagaattgtgggcttaccttatggataatatcaaaaagaagcgaatctaaccattaaaaagtcctgcgggcacaccgatcctttttataccaaagaaggacggaggtctacgtctttatatagactaccaaggcctcaatcgcattacgatcaagaatcgctacccattacccctcatttcggaaatcctagattgtctctctggagtaaaatactttagcaaagtcgatatcaaggacatatactaccggattcgactacaagaaggtgacgaatggaagacagctttctatactagatatggccattttgaatatatagttataccattcggcttatcgaacgtaccagccaccttctaaagctacattcatatagcgttaggtaagctagtcgacgtcgtttatatagtatatctagacaatatcttggtatttacgctcaatcgcgaaagctataccaaagcgctataacaggtttttaagcaactaagaaaagcagagctctatattaaaccttccaaatgtactttctatcaaagggaagttaaattcctaggctttattgtgaatagagatagggtgaaaatagacccagatcgcatccgagtcgtctaagaatagaaagagccttaaagctaccataatatccaagtattcttaggattttataacttctatcggcactttatcaaaggatatttatacatttccttacccctgacatccatattaaaagggagtaaaaatggaaagaaaccaggccaggtcgcgctaaccggtgccgaattggtagcatttcgcaacctaaaagaggcgttcaagtccacatctctcctttaccatttcaatcctaagcaacccattcggttagaaaccgacgcctcaaataaaggaataggaggtattctcttacaaccagacctagaaggacgatagcacccagttgccttttagttaagaaagttctcaggcgcagaattaaactatacaacaccggatcaagaactattcgctatcgtacactcctttcaatactagagacactaccttaatagcagcaagtataccattgaagttctttctaatcatgctaatttacacacgtttataacctaacagaaactcaatggaagacaagcatattagtatatatttcttataccttttgactttattataaagcataggctaggcaagacaaaccctgtagataggctatctagaattctaaattccaagcaagcagctctaggaatggaattaatgaccctaattcaaaatcgaattataggcaaggagctcccgatccaaagtcagatcgaggatactaccactcttataatccaggggattatagggataaaagatctagacgtagatctagagcatgatccaggggaacatgactcaaagcatatatcaaataaacataactcacaatttagattagagcctaaggccgtataggaaagtcctggatccagtgcacctacagggataaatgcaaaacgcatcagcacagaatcagacaattggtctgaatagagaaaactctacaacgatctagatataccattcagtatcgaggatactacaggggtagttatccagtctattagtacagatactaaagacattctccaatgggttactaggcttcaacaagaagaccaagaaacgacctgccgaaaaggggacatttcggcccagaaaccaggcctaaaaggctagggagtcgatacaaccagattactatagtaccgggggcgtatatatatacctaaaaaagaaggcctacatacaaagcttttgtaattacaccataataaacctcttatagggcatttcggccgcgtaagaacagaggagctactaaaacgcaactaccactaggtgaatatacaagaagatattaaaaaatacgtcaagtcttatggagtctaccaaactacacaagcgccaaggtatcgaccctatggtaagctcgaatcgttaccaattctatctaggccgtttgccgagttatcaatggattttatcataggattacctcaatcgatctagaaaggtcggatagtagatgccattctggtcattatagatcgcttctcgaagtgatgccttttcttcccagtttcgaccacaatagacactacagaattagccgagctattccatcaagaggttgaactaagatatagaccacccaatggcatcgtatccaaccggggatctgtctttataagcaggttttagtcaaaactatactatctttccaaagttaaactccagtattcgacagcgtttcacctacaaaccgatagttaaacagaaaggatgaaccaaaccctcaaacactacctaaggtattttattaataagtaacagaaattgtagccagcacttcttcattcagctaagtatacttacaataatatggttaatacaaccacaagcatatctccattccaggtactcctaggttttaatcctaatttctaaattcacggtaaggacgcctgcgttaagagggaggcgccagctacgctacacagatttgaaaaactgaataagctgcgcgggaagctatagatatcatggcgaaaagctaccaaagcacaggcgaatcagtataacaaacgccatcaagcaatatccttcaagaagaacgaccttatgaccctatctaccaaaaacctactgttaaaagaaggaactaccaaaaagctatctcctcaatagatcggaccattcagaattttagaatatatcagaaagcaggcgtaccacctcctactcccagacaaatatactgcgattcataacgttttccctatctccctcctccaaccataggaataaagagaaggggaaccagaacaactactactaccagaactagcagataataacaaataggaggtcgaagaggttaaagatgaccacgttttcgaggacaaattacattatctagtcaaatggtagggctagccttctaaatacaaccaataggtcccagagagtataataaccaacataccgaagcttattacaaaatacaaaaaggcacaaaagacgcaaaagaaatcaacctaagcagtatctacaccaggccgctatcgaatcatcatagctacagtatccaatcgccataaggaaagacagtcatacactcctcgagcattacctccacatccggatcatcaagcaactccactgcctcagagcaagtttattagaatgaaatcacagcacctatccaagcagtaagcgactcctccgaattcataagtcagggtcgttccaaggcctataccgcaaggatatcccagggataaacggcagcacaagtatcccggtcacctataggatactcagcaacaaaggccgcatagttatcacaaacagactgggaagagatattagcgaaactatcatagagaagaccagattcgccccaatacttacagtaggaatatacatcccactcagactatggttcctacaatacactctcacaagggtatcaaaagccgcgaccagatcgcgaactatatccgcaactacctcgataaactcagaagggaaaaggaactgtacttctttatcatccttatccaatacacccacagctactctaagggtccttctggtcattaaccaaaattactccgcccaggaaagaactgccagcaactagaaacaattcccctcaataccagcaggaacctagttctaaggttagtacaagttctatcagaacgcagccgaaacagctaagaagatataccgaatcacacacgtagtacactttcgaacaacatgcgcaagatttgctatacagcgcatcgatatagcactagatcaccaaagggaaacaataatcatccttatccttatcccaatctcagttagacactcgcatatataatagacaccaggcctaccgacgaagaatagggtttataatggttttccaacgcattcccttcgaaccagcagtctttgccattacactaaggatttagtaccgttatacaggtaaaacgatcagaagaaggggtctagaaatcatagaaaagcagaagggaaaaggtagtaattatactataactacaatcacccactgcaaatccatcaaaggaatacaattatatcccaaatgacagctgtcgcaaacatgtttctttatgcaaatgcctataaagaacatggctatagaggccagattcacacctctttaaatcccctaccaccagaaatcctgcacgaaaagctattcccagacattctctatattatagaaaaatatcaatatcctacagaacacagtcttcacgaaacgtgtacattctggcagagaatcagtatagatcggaagcgaattccaggagtctatacaatgcctctctactgaaaagataacgtatacccatatattagtggtcttgaagaaatataataattatatagccacccttctaaaagaagcataaaacacggagtatataccttatcggtcaccttcttttcaaattgttatacaccaccttatcttctttaatatatctaccgctttactttctttattatggaaactccctgatacctccccgattctttatcttttcgtcccttaacgtttctgtttgcacatagatgaggacatccgcgcagggagggggagataattgtaacggataaaggtctgtataagagggaaacacatataaacctgcataggctcaggaaggaatatctttgtcatcatatatctgtttcgatgtcgatccgtgaggggttcgtcatatgaatataggcagatagatttccttatagcttaggaccccccaggggcccctccgagactggcaagaattagtcttggcacatcatcaatacattgtgttccctccacaaagccctttgtatcttacccggttgacaggccgtacacctgcataacgtatacctttacacgcggcgagggctcctttgtcgatggagtatcgcgaccctagtacctagcctacggataactcaaccgcttcctatactaggaaatcctgacctctataacgataatgctcgagtaggttagggaagcttcgatgggcaacctagtgtatcgtctctactaacgactcggcggaagagggctcctatttaaggcgttggatgttgactaacttggccttattgcttcggagacgggcgaggaagattagccgcccgaaaattcgaacggtcgactcgtaggtcagctatagatcttcgtcgacttatccgatctttggtactacgtttggattctttcgctaaatgggagcgggacgagctaagggggatcctacggtgaatgtttcgggctaggagtcggataggtatagccgtgaacgagaggcctattcgatttcgagatctaaatcgcgctttcgctttagactaagccatatagtccgtggtcgaacggggtgagcctgattggagtctattataaaggcgccgtatggagagggttgctagtttagtgatatatacttaggttatggtgcgatcactttatactccagcgtctacaaatctgatccggggcacgtctactcgagagggaactgaaatgagcgggcgtatttgattctccggccgtccgatattcatacggtcggcagaagtttgcgcgactgcttgcacagcgatggcaactctttgtgcgggtcgttcaaggcctgtcctcgtcacatgttgacagaattataatctgcaaccatccaacgacacaagaaatagggagggtgcaccatacatggtggttcgtggacatgaaagaaacagccaaaatgcccctagctcggacgatgccggagtactatatcattgggccaacatcttgaatttgctacgtagtaggtacacacgcgacaagactccaacaaacgacgcattgctcttggcatggatgatttaggattgacgttgattgaatacaacaaatgcgcactggaaggaggcgggatatcgctgcatgcccggattttccctcagtatcgttacctcactccctcaccaaaccatgcgtgccacaccccactactggaatcgttctggaggctgtcccctccgcgccgaccgacggagctcagataggtcagacgaccccgaagggtcggtttgttgtgcaagtcgagctgaccgtcgttgagtcgatacaattggttggctttttaccgctaacccatccgtggccgagcgacccggagaggacctatccacggaacggtcaacggaacgggttgatcgatggatttgttgctcggaagacaccgattcgtcgatgcgtgtttcgccactagggccgtctgtcctcaaggagcaaatgaacgcgtcaaaagctccattatgtttactgcttttcggtcagcgacagcacacaagacaccatcaaagagggccaattgacgtaccatattggacaagggggattattctcaggtggggagaatccgagccaagtttccatacaactcaaatggacaaaaaaaacgcatcttccacacttcagaactacagggtcggcttgggcttcctgaaggcagatcaggcaattcatgtgttctgagacgggcaaatcattgagactcttgagccgcaatgagtgcgatccgcgttcaatagaataagtggctggacgggttgaggaaattcgccagggtacattattctcccgcagcatatcgcgtgtgacatgtcgtctggtgatacgggttgtctccggtcgcacaggcgcagccactggtatgtaaggtatattccggacagccgcatcataccactgttgtccgagttggtcggcctggcgtgtccgatgccaccgccgacataggaagtgggacgcaatgtcgcgcaggatcgggaggtcggaaagatcaaattgccttctagcaagggatttcagcttattgcgaccttcatcaacgtcattcactgtcgggtagagtttgcaatatgtcccgtttttggtgaggccacaacaagtctgctggtgcctgcgaagacccatttcacagatgaccagaggatcccatcgctcctgagatgacggcatgatgagtatagatggttgttgatttggcaagagagctcgagaaaaagagattgatgaagacggtctcttcgaccgcccaagagtatttatattcataaatcataagtctattcttggagtttcccaaataatatacgcaatgctgcctgttgaaacagatacaatgaatggctatgacggcgatatcgctagcacacgctgatcgggataaccagtgggttgtacctacatcccggagcagtcaaccatggccctaggagcagttgagcttgcggcaatcatttactccgaggaagtcaatgaatctccacggaatttagccatgaaattattttcgacgctcattgctctcgttaagactagagccatgacctggcttgatatcacaggagttctacctagtggcttttgaggtacttttgctcaatctaggtattgtactctctacgacgctatataacgggtgtcgtcctctcttgcaaatgtactattttctagttcagctctcttttaatatatatcgggactctatctttcaatcgatactcagctagattgttagaaacccttactatcgactaatatactagggtattagggacaatagaattaaatatcggaacgacgtgctaaagatatctcgtattaatagtgcgatctaattaggcctattccgaggaggctttaatagccttctttatgaattagtccttataggtgcagtaaaatctatattatatacaaaatataggcccgataactcccgagctaagtagtatacctaataatagatttaagaatggattgctaagtttaatcaagcagatattactcctataaccctgaatctaaggatctataatatagactaactggtatagtattatttagctatattatctcccgcggtatctatataacgtgctagattgattcctagaacgccggttacgttagtatttcgaagttagagacgaagatattaggatgatattgtaaaggctaaagaagccctatttaaggctataactaaggtacggctagaatttatcttttaatacgttagattaggttcttatattagaagggctctaaggttatatagtcgctaccgtcggtctcctctccctacaaaatcgatactatacgagtataatattggtagtataatagagtgtatcttccttagtaccttattagccctacttacccttctgcaacttatatacgataaagttgctcgagctattctgtagcgttgtcaatagaatccgctaataagggttacctactatcccgtatatctattattaagaagaacagttaaaaaccatatatatataatagaacgatctatagtacctaccggattgacctacccgattttgaatactccaagtcacccttatcttaattgagattcggagtgggtattatctctagagatagggtagtcgacctccgcgtacggtcatattcgaacgctagtctaaggatactagctaccggtatggcctgcgatatagttaaggtaagggctggttcgaatttatctagtgcccgctctaactctcgcgtgagtgcacgggcacgggataaatactttcgatcttttatcactactaaagaagggtgtactgtatatactatacgcggagaccgagattatagacttctaggaataaacaatagagtagaactagcttcctcttatgtttccttcatcgaagaaataaagcgagttatcatgctatgtacagttccgctcgaaattagtttcaccatttcattctcattggttctttcttaagtcttggccagacccatctcggcctacatctggactagcccatcatttactatcaaataggaaaagggaaattaaatttcgctagctagactaggcctagcattagtaaaactagacgttgagaaggaatcaaagagaagaaattggtgaaactgatttcgagcgcgtctgtagtgcggagttcgatctcgttgacaaacacgggtaaccgcgcgcgcccgcagaaaacccaacggctagcatataggtaatatttacacgttggctgaccattattcaacataacttagctgcccatttctgcgggacctggagcattgcttcccgagctggcatctaccgttgctgcatcctttttaggctcctacgcctccgttttctcgaccacgctgttaagaatgacctcaaatgactccgagcctcgggaaccttcttagataccgtgttctttcagaaaatagtccgttacagctcccatccgctggctagccttataaataagatcagccaatttgctcacttgctctagctcgtcggtgacctacgttagggccttccgcgtagtgtttaggtcttgatcgagctttacctagattttctctgcacgaattgcccgcgaattcactgcggtaagaatacaaagtatttcctatagaagttaggagagtcttatttaaggtacttgaatggtattatactgactagagtatctatagcttagctaattgagcttaaggaaaaataagtattactaggtaggtcctaaaaccctgatggtcgaatgaattaagtcctatagactcggtttatctagaggacaagcgaattagtacagttatactaccttagtcgatcaggcgactaaggcattgttaggttgagaacgttgatttctgcgggctagggcagcctttacgttgaagactagatcgctgaacggatccgaaaagaacacgctgttgtctccccgagtaaggctaaataacaagtcgacttggcgaaataaccgtcaccgagacacgagaagaagctacggcgagattatcgatggcgcagatgactataatcttgttcatgccaatatacatataggtctatggagcagcgattgttagtttgtcatagcgcacacagctgtccctaggcacagatagattactagatatcattttagttctactatatctatagtcctttctttacttgtgagaccatacctacactcctatcaagaatcctaaaaaggatgggactggaggtcatatacatcgttgttgtccgccactctcgtcaaggcgaccgacggattttccaatcctcttttcctcgagattactagacggtgagtggaatactggaatgtgaattttggctactaacttttactaggatgtcactgtgaccgttgaagatgaacaaagcccgtcagtagcctcaccgaactgactcgcagcttactagcggtggcatacagtactccatgcaagggaaatcggtggtggaatggccctggatggtgtacaggacttgaaggatgaccgttttaagaacatggtcaatatagttgaagaacttccaattataagtctgcatgacacatgcacatgtatcgtttaagaagactgtgacggcggggtgaccgtgcggtaaagtaactgccgtagagatatcgcagcattagatggcaggtctctctgaagtagacctaatagaaataattcttggagacgatcgaagaacgtgctggcactttcgttgaaggcttcttcaacaaccaccgacttgaataaccaccgacttgaataaccaccgacttgaataaccaccgacttgaataaccaccgacttccgctttccttatcgatgtgctttttaaacgttctcacttgaacgcttgtgcttaaacgttcttaaaagtgctttgtttaaccgttctcacttgaacgttctcatttaaacgcttgtgcttaaacgtgctttgtttaaacgttctcacttaaacgttctcatttaaacgtttgtgcttaaacgtgcttaaacgtgctttgtttaaccgttctcacttgaacgttctcatttaaacgcttgtgcttaaacgtgcttaaacgtgcttgaacgtgctttgtttaaccgttctcacttgaacgttatggtagacaaagaactcgcgttccccgagcctcaaaatccgaactaatttggcccacgtagatcactagctaagcgaagttacgagggctgtcggcccatttctatgggatatccgttgcgctaaacctttcagtcaccaacggcgcgtcaaactccacgcacattggataaagcctgtttcttggcggtcattgtgatttctcatactagcgccgaaaatccttcggtcggtcggtcggtcccgcaatgcttgtggttatgctccattcttggaagttcattaattgattgcagggatcgatccagagctcggatttatgtcctcgccagccagctagttcatagctagtgtataccagatacgaggccaaagcgcatgctaccttgttgtaattattccatcgaagcaaatattaacaaaggtggtcagtcttggaccttgggctggcaaaagaaatagtctcaatataaaatcaaaaatttgtccgatacagtagtactgtactatacagcgattttcgaaattaatttaccgctcgagcacacgcactttgtttctcggctcgtacccgaaacgggcgttgtctttattcagataagtggtaacataacatccactgataggctaggtttacttacgactactcttaattgggaaaggcggcgttttgggtacgaaccgggaaacaaagtatgagtgtctgaggggtactgtaaactgttttcgaaaatcgctgtattgtagttcgtaggaaccattttgtgttattcggctttcctgtcggcgatactcctgcaggatttgtccatcgggtgatagatcacatgcttcattcgtacgaccgcctgggtgggtccatggcttgctacaaggttagtagctagaatatcagctagcgggtcatttcggggctctctgtacagtagaatttagcatcatttcaaaccccgcctttaacctggggtagggtatgaagtctagtgatggtgttttgtgcgcggtagcgcagacgcaggtgttaggcaacacatgtgcttctacgtcaagtgtgattgtttccactgttcgaaacgaagataggacgcggataagagcagctcgttgcacggtgcagaggtatcgtaggtgggtcttgtctcgaagggaatcgtgctagacggtcgaggcgtagtcgacgaccagtgtgacgcacgttcagtttacatgtaagtagagaagcgttgtcggaaagtatacaagaggttgcaaggaccaaagcatgaagccgcgacacgatatgagagaatgaacagccagggaagagtatgctgctttcactatgcaatgactatgatctaaactggagatagggcggtggaggcccagacagcctttcaatgacaggctgtcgctaactcggctttcttcgtctcaggatctcagatgagacattagaatgcaggacaacccatcaattccatgaagtacaagctcaatgtgtagtcccaatcatggttgcttcgctatccttgcctccaatttccatactgggcaagttcgccgaatccgctgccaaagctagcatgggagccgaaagaaattcaacatgaaaagggccctggacgaatttacaagccaagaacaagatacagccgagagtgggcaaaatagtgaatgctggcagtcgaattatttatccaggacatctgaatactctcaaatcgaatactaccttttaatcacaaccataagtaaacgctacaaagatgtacaaacaccacaaatgaaagcctcaacgatgcataaagatggtggcaaacataaagaggaaagacatggtcaattgtcggtcttccaactgtgatggaagtgttggcccgatagtcgatttacacgaagttgttggcccagggaccgtttgttcactcatacccattaacactgtttatcagcgagtcatgttgaaacaaccgttaaacttagtttggcgcctacgtagagggctggaaccatgcaaatcctggctctttgggttgctttcctccctagttccacattcaatgcgactttaaagctcatactttcccgcttttgccactgtatctcagacgaccttttttgtctccgtaaacactatccgttgaaatcattctttcccgggaatcgttgcccgccacaccgaagatgccacctacgcggaagcccgcttcaaaggctcgtcaacgggcccctggtctgtccacttctgccagtcgcattgcacgtcccttgctagctgataatgagactaatcaccgatcctccacccgacaagaacagctgcgggaaacgttcgtgagtgtcccttgtctgtaaagccaaccataactaacttcggctcaaaggcaacaacgtcctcttcacaagcaaagaagagagagcaagaggaatggaacgaaacccatcgaggctgtctggatatcctgggcgatgccgatgatgactaccaaaagctctccgcacaggtgatgcaacaacggcaagaagctcagcagaagctgcagcagctccgcagtgagcacctccaagcgacagccacaaaccggcagcttgtcacggagaggcaaaaggccctgcatgagaagcaacagtgcctcggcaaaatccagcggctcgaaacggatattgctcagttgaaacagcagctcgagacagccagcgaccagaccacggagcaaatgatatcgcaaggaatagagagcgaattagagacggctcacggggatctgatgggtgtagccacccgactctggaagaagatccaagaacagcaaaacaaacgctttggtcttgaatttccgcaaagtgatgtgatgcaaccacccacttggacgaactcgaatggacaatttggagcactggacccgaacacgctaccgggccctcccatgacgaacgcattttcgttggatacccaacagacgcagacgatgccccaaatcaaccagtatggagctctttcttgagaagcgtcaggcattagtgccgttggagcgcgttatcgtcaatcgttcatgggtcgtgtaaactaatcaagtatcgaagtctccgcggcctcttttgtctattgactgggaggattatctcagcgaaacaatgaaatatgaaataaaatccaagtagttctcttaaggtcgtgagtgtatgcaatatcgagttggtctacttatcttggtgattggccagcacacgtgtattatgtcatccaacggtccctcgctagattcaatatggtttagtggtactgtaatcatttatcattctgcttcctcggcacggccctgttccgggaggggcggttcgtgctcgggccgccaaagtccctacataacgcccaagtatgttttggacttgcctattcccccattgttatggtgtcaatacttgacgaattgagtatttttgattttcctaggctgctctcattgaatggtgacgtgagaaaaccagcatccctattttcacatgtcacaagtggtgctctggaccgggaagcccaaacccacccatcatttagcgcccgcgtgcatggtggcgttaggaggctggtagatcaggggaaagataccattttcattttatgcttcgatcggcgcacactagtgtgatgggcgaggaaagtaaaagaaaaacaatttgagaaagataataataataataataatatgaaaggttacgcgaggcaacgatcgactgctgtggtcatttcctcttccgcttgtactgtaaccctgtagcaccgtcgctgagactgatatttattgattgctttgtgcggacctaccctcgaaactaatcctgcgggtctgtgtatcgagttgatgtcaaaaatatgctattttcgtttccccatccactaatcgcgcaaggcagatgatctgtcttctccagatctggtttcatcacatgccggcagtccaagaatagctataactactgttcgacatgttcgtccaccgtttttatcgggcgatcaacgttcgattcggatgccgtagccaccgcccggcctatatatcttccgtactgcctgatttgtctctagagctatcccgctagtcctatttcttttctaacaaatcactaatttcacagtttcgcaatgattccagacccctctcctggcatcacagaccggggtcatcccaagtttcggcccacacagtgttccctttcccttatccctcgaagtcaaactcttctgacatacggggcagataggacaaagaacaattgggatctacgtcaaagaccagcagtaacgctttgagggaaagatccgcatatatcaaatcaatctcaatctcagcgacggtgtcccaggttgcagggggaagaggggataaatgaccacagcagtcgatctttgccgggcgtaaccttcttttgattttaattttctttcagcctcctaacgccaccatgcatgtggcgctaaacgtggctagcgcgtaccataaaccagaaatgggtgggtctgggcttgtcggtctagagcaccgctcgtgacatgtgaaaaattagggatgctggttatctcacgacttcattcaatgagagagcagcgtaggaaagcattactcaattccatcaggtattggcaccacatcattgaggtaatagggcagctcaaaacatactacttcggcgttatgcagactttgggctgggagaccacgatagcatcttcctcgacatcaataacgacatggtagactcaccacaaattatggttttatggtagaccaagtgggccatatcggaaatgaggttgcaagttatgcttttttttcaatccttgactggtgtcaccgatatgctctctatagtggcccaaaacggaaggcgagattgctcctgagacgcgaaccgttgtgatcggacagatgtgccgcagtcatcctgcattagggcgaacctagtaagtctgggtacagtagaaaaatacagcatttccgattcaaaattacctcgggtggagctagcggatttctaaattaaatactctccgacactatcttactgtaacgatcggcaatgatttggaatcatgacttgctcaaatataacaatatatttctatggattgagaatgatggaatgtttgattccagtagagcagaagctgtaatatcgctgtgatgattaagccagccgttaggaactgggatagtgggtggtattcagcctgaaatgcagcacaaaaaagcgaagggagagtttatagcaaactaccatatttgacaccaacaaatacaatgttagcttgccgtgatagccggcgatgtcgatgacgatctcactggtagggggaatggccaatggcccgcgcattcttgttaacacgccggcgtcatcttatggcgaagctgatcaggtaggcgctctacgggaggatatgctgcaaaggatggatcatggaccgcagtgtgaagagaattggcttcttatgccatgcatgcagatcttttgctctatcgctttgtccgctgcgcctttacttccgctctcgattctcggattaggtagcatggaactgcttgtcacattgcggctcaatccgtggaaaacaatcgcatcactgtgtcggcctcttggggtgggctgcttttcgatccccgccgacggtatccttgcccttgttcctacccgcgttctgccgtaactctttcacttcctcttctaggataacgagtctctcccccagggcctgcagagcctgctgcgtgtttttattacagtcgcgctggaccttggcatattcttccatacctctgagaagtcacgtcagcttcgctctaacagtcataagcaaggaaaaaccatgtcgatcggatgtggcactgactcttggcgtagatctagactatcgaatctgaatcagcatggatctcgaaatttcatctatacaagggcaatatattgagacgtactcggacagcatcgtaaaagccatcatgatcgagccctcggggggatctccagaagattggtccttgactgagccctgctcatgctcggccccttcatcggcctccatagcccagtcattttggtcgtcgtcactgccttcgtccatcggggtgatctcctcttcggaatcagattgaccatctgcttcgtgagtttgatagttcctgccggaagaagttgacctgggaggactccatacgttccttgacctatcaggttggggtgcagaccggcataatcgactccggtaactcgttgagtccgtgttgggaaggtagtcgcctgcagtgaccatatctgtcttccaggcttgacgagttgattacgaattagatttagagtgaaaaactaaattgatatgggagcctagactcctttataagtcaaatcaggcagcatatcgcaactgagcctggagcaactaacagggatttatccctgcaaaggcaattgcttttgagaagcaccaatagaacaaaacgtagcaccaccccacgtcgattgctagaacagtagttcaccggttaattttgatccgtgatcgaggacatgtattgcttgagacactagttgatcatgtgctgtattatatgctctggggcttgtctccaacgattctacctagctagccttccccgcttggaagctgacgcgaggaagcaataaaatgatgtattaattttatgttggttgtgttggttgtgttggttgtgttggttgtgttggttgtgttggttgtgttggttatgttggttgtgttggtttgggttaattaaagttaccccaatatagccaagcacataccagaaaataacttgatggcgggaggcaggtttccttccatgaacaatataaattcataccctcgtataaatgaggaactaagatcggctgcctggagggtgaacacttttggcttgcacggcgctcgaccaagaaagaccatagctgaggagatggcgaaatagattaacaggtagattggaattatgtcaaatgcaagtggtgaccggggtatggcatctatgaatcaccgttgatctccttgagctcgattccacatagaatgtctccacaggcaccaacccccgatagtttggaagtgttgcctgtttattatgcttctattgcgtagaaataacggtggcaggttctctttcctaatctataagtcacccggctttgtacatggccagtcatagcaatgtgaggctgtggccacaacattggaagggacgactgcgttatggaacttctgccagaattgagcagcgtatactgggagcatttccaaccttctcaagacatgctatctttcgtccttgaacaatctcagtcacatctcaaagcactggcgggacgtgaaagcttcgcaaggtttttagacgtctcacttataagtgacatactagcaaagagaacagaagtgatctttgaagcaccgagtccttgcgtatttcgatctgacaaggacgcagccggtgccaatatcagctggctcgacgttgtcaacgaaaagaactatcaggccgaacatcaaggcaatggtatttaccattttcacatgcgagacaagggcgtgattgttcaattatctaccttccaacacaatatgattctttcgggattgcctcggcagctggtgtaaccttggtcatacgagaaagatgtgcagatggagttgtgttccctagccctggcggcggaaatgacttcggttatgaaccaacttgcgtcggaaggtaggtacactcaaagtatggttgaccctactcactcgctcactccatctcgcagccattaaagtaaacaacactgtgctcgaggagataggaaaaagagtgcaggtacttcgccacttcccacagccaggtcaaagatcagcagcatcatcctttcccgagcgtgatctggtgtcggtcgagtcgcccgcgattctttcgacagctggggctgatacttactttctcgatgggttcgctgtcgagactcaagacccaaaagttcaaggcagtaccaaaaggcgcagtgctacaaaacggagctgtaagtttgggaccgagaaaaacacgaagcaacgatccccagaaacaggactgacaatatgaacgtgccagcctccaaaaacaagctttggcctccccacgtgctgaagcagcttccaggatggttcgaagaccaagttcagagaaatttttcgcaagacgagattgcccaacacttcgaagagaaattcgagcaaaaaaggacctttaatgctcttgaggccatgttgtataagctaattggaaagagtccctataggaagcgcgggaaacggtcctcggtgtcctcgagacctcgtcagtcttcaccacctcatcattcgtcaagttcattagacttgtttgaacgaaagatattgcggtcgaatatagatgtacacacattacatctagccccaagcattttaccatacattgttgcggataacagcgaagatgagaatcctgtcgcccacccagatgctcaaccgattgacttaaccccagagtctagcaactcagaggtagtacttgaatatggtcttgtaaatggagagtcaggatgcttgggtgcatcccaaggacacatgcttcagccaggtcaatgccccgagacggaagaaccgtcaaaagacctcccagacgtttcagacatgatggctgaagccccctggcagttggaagacccagatattgataactctattcatgcgattgaggccgatttgaggaggggtggttctcatacacctcaagggcctcccgtcgaagttgcaccaatgcagatgaatcagtcagctttgtcgcaaggcagccgaccagacaacacttctgggcagggccttgtagatccattgaatagggtctcattgaatgagaacacccaacatgaacctgaagacttcttcgatgcgtccagcctcgccagaacaaccaccccatctcaaacttctcagccaaaccgccatggcagctcgactgaggaccatcctctgaattgcggaaacagtgggacatccgccaatttcatcgaaggaggtttggccgaggaagaaatcgtacgaaggtgtcttcttgagagatctcaatcacagacggtgcgacttcatcgtccatggaggatcgaggttgtgaaccaactgccgcaatggctcatgacacggaagcatctatcaaaggacagactggaagttgagttcctaagggacttcaaacactatcgaacatcatctgccatcagtgctgcttgtcgcaaaaaaagaaaggcagaagcccgtcagaatattgcaccctcaagctccagcccgattttacaacctcgggccgtctctgtggcatctgacgctattgaaacatcacgtatgccgaacaccatcgcctcacaaggcacgtctagcttgaatccatcctacttgtcgagcaaggagatgagtgctcctgagaactcaccgttggaacggtatccacaacggactcagcagcagattccagaggatagagagggatctttctccaatcattcttttttctcgcatggcgaccaagaggcagtagatactatcccgcctgcttccgttgcctcgtcatgcgctcctgcgcaaacgccggtttcgcaacacgtctgggttgccgacgatattcttggcatggacaatccgaacgacccttccctagctcaatctatagcagtcaatgatgggaatgctctccaaactagactaaacgtggagagcaccactccacaagctcagttggaaagggggtaccatggagctctgaatgacggggaaagaggccggcaaacatcaacaccacctgaagtgccagtgggacaggaatcgaatgaccagaacggggcgcgaagaccaccccccaagggtaagtctgtctcctctccttagccagccacgctttcagtcccttgcttgtaacgtgtcagacttatccaactcattgagcgcctggcttctgactcacactcattcatatactttttgtccgcacactcatactgactaactttcttgaagcgtttggagaaggacaggcatggcggcatgaccgaaaaatggcagacagcacacttgaagccaccggggaccagtcgtatcttcccgccgttgacacccgccgcccgcaactggaaatatctccaaatctacaaaccacaccgcaggtccaagcaaaacccgtgaccgtgccatccgcgaataactctcggacctttcacataacaaagcaaatccaggatgattcctctggcttccaggcctcatcccctggagtagacttccgcagagcccataaagcccaaagcccaacccagcccaacccccaaatgggttgggtttgggcccaattctcgggcccaccgatgggccgtgggcctatagtaagggcccatgaggcttttgggggggcccattgggccccaaacagtgcaaacatgccaattcttggcatttatataagttatgtagaatttcctagtatttttgagtatttaagttaccgtctgaggcccctaattgactgagttctcataagaattgactgaaatcactgtttaataagattgataagattaactgatgagatcgattgattagatattagtggaggctaaactatctacgtgaatctaataacgtttatataaatcatccttaatatacttcctcttcctccccgatgtccgtacctaagacggtgcagtagtgaatctaatagtagaatcgttattatcaaccctatcgttatcgttatcgtcaatatcgatcagatccctagacctagaactaggtccatcaccctgctctttagtgttactgatctcttcagtatcgatattatccggtttcttaatactttattctcttaatacgttaatcttattagataagaggtcttctacttgtgagacccctaggtatggaatgcctgagggaatgctgtatgtaatggaggatcgggaaatagagatagtagtatacgcagtggtatattagaaactaatagctgcttctccaaagaagcaccatgcgaggataatatacaggttgtgggtcacatgattaaagggggctgtgcaggcagcacacacggctcctgcccagtccacagttccccacgtaccctgacaggtgcaatacctcaggcatcagccttcttagtactagggtcctgacactactacctcctttgcctcctagatattaaggttaaaccttaatatatagagaaatagtatcagctctttaatagtattagaatttagttaaccgcggcgatagtagtagatatcttgtatagtattgaaaagacgttctatcctagcgcctgttatagggattataaggatatcccttataagtatagtaatagctggaaaacggtattgattctctttctaaaaggagagcggttctaaatcagttatatctatataaaattagtattaagtggagagatggttataaagataaatatagagatagctatgatataattaaaagggtttaacttactactatcgagatactacgttatcttattatctatgattaggcctagcgttactttggagtgaggcttctattttcgagctaagttacgaagcagtgatcttaatgccgatctagaggaaggctcttataggccttaggcactagtaagacgttcctagataggtataagggtatctcggaacgctactcgatactgattatagagttctttagtatctgcctagttattagaaagaaagaactagaatctactatctagtaatagcattgtacaaactgtatagatatgcctacgtattttattagtctctttgtagtagttacgtaatttagtatagctagctttgagagagctaagtatctactgtttctaaaggaccctctttcgccttagctgcgttattaatctcttaagatacttaaagagcctattgtagattaaaaagataagatacgatattacctctcggctctttaaaagggtaagggtaaaattaaagaacggcttagtaagatatagaaggtagttaatttggcgctattgattattattaagtacgaagtctttatagttaaactaatcatagtactttataataaagacgtagagtctctttacccggcgtaatattagaaacgttgaattctatcgagttctaatatcctagatcggtataagcccttaccctaggggttagatagtaataaaggagtcccgacgctaggagctcccgcggatataaagagtaagataccgtactttttttagggtatacaagatatcttacttcttagatgccgcgtttacctttataagggtgaattgagtgtctatctatatcttagtagtattatttagtaggactacttttaaacgattaagcagttagtttaaactcaattagattatataggtaagataggggattcggataatattagtattattaggtaaagactattaaagagtattaactagagtcttattatttaatacgttgttagtagttaatccaaagactcggtacttaataccgtacttagtaagcgtctttataagtatatcacttagatttatacccgaatacgtcctataaaggggtttaaagccgagtagtacctcgcagtagacctagtcggcgtcgataaaatagctagtaatagctataaatacgtatctaaatagagatatctaacagtctaatacaactgagatcttcgtatactctagaagtatcctaagtatatcttactactaatctttgatactagtagatagccgacgtcgaactgtattagcggaaggaacgttcggaaggcttagggcggattgggctcttataataaggcgacgaaaggttagattctcaacgagattaaatagaagccggttaattataataaattgtaggattttattatcctatacctcttacgagaaaggttcttcggtcgtatcgccctagtttaaatactagttagtagtattgatccttaaaggataatatgtctttatatactatttaaagaaacctcgttattctatccctctgccggtgtctacttacagccctttaataggaagaagtattaatatggcgaattatcgttatcgtactataacgactatctttccttaagctcttaccttatttagccccctccttcctagtagcgtaagggtatttaagaattatagagtatttcttatatataaccttcgcggtactatagatagagtgtgtgacttggttaaattccttctagatcttcgcccagctatactacgagtcctaattaatcttactccgagatctatagtcagtctacagccactagttgacctaatcgttatagagtatcgcgttataaaggaaatactggcctctgctaggaccgatacattagaatcgtttaaaaggatctagagcgatagacgaaggaatagacggctaaacgaacgagaagctattaacctactgagaggtagacggggtagctaggtagatagaaggcgtatcgaaagataagtcgtctagcttagagtcgaatagacttaactaaaaggatctaaactcctagctttacgatataattagtgatagtcaatagattcagagttatataattagcttataggtaatggctttaagggaatcagggctagggaggaaaaactaacctaccttcttagtaagagaactatcgacgcggtaggcaaataaaggatataaatagaggattatactctatagtgctagtcaacattaaaacggagggtcgcaatactagtatctcattagctagataatatatatttagtggattcggcctatctaaagcctaaggaagcctatagataacctatctccccgcctattttacaatttgttcgtccaaaacatttcacccaatagctcgtaagatatctttaagcttctcttacctccggaatagctagaatatcacggtattgtaaaaacagacgtcgatagtaagatattagctatcttttagtataagattcaacgctataaacctacaatttatagatttgactagactgcggcacgatccacaatatccgtggatatccacaatccatatccgcaaactgcggatatggatattttttgatatccaagatccgcagccttgcggatttggatatggaccttatatccattggatatctgcggatatccaatggatatcaaacaatacaaacatgcctagactcgtgacctcaaggggtgtgcattattattatacattcctatgtatttttcgtgtaatacttggtactcgaggttattgaatattaccaggtaaaccgtaagtataatttctgaccttagtcagaaattatgggtagaaggtcaagtactgttctactcacagtagtatacaattggaatctctgaccatggtcagaaattcagtctatacattttttagggggtttatgaatttaaatcttctaggccctatttactattcatagatctaactggaagccatctggtaaccttggctgttttcgaatctaccctgaacggcctagcatactcccatcgaccggcatctctagaagcttatcatcctcttcaacagcctcgcatagtcgtttttgaggttattttccttttacccgtctacgtcgctcagcactatcattatccgagtcattatcaccgctctcagtatactgggtagcctcgagtccagtctcttgatcctcctccttattatcactgataggctccaagacctcaagctgtggtaatgatctccgggtttgatctagcaaagcagcttcaccttaggatagagtgatagcccgacagttatcctatctagcagagaaatatagcctactactaaacagctagttcggtagacgaccgggtaggactaccgagtaagctctactagtactatctagtgcgatcgataaagcctagtataagtagactgcggcacgatccacaatatccgcggatatccacaatccatatccgcaaactgcggatatggatattttttgatatccaagatccgcagccttgcggatttggatatggaccttatatccattggatatctgcggatatccaatggatatcaaacaatacaaacatgcctagactcgtgacctcaagggatgtgcattattattatacattcctgtgtatttttcgtgtaatacttggtactcgaggttattgaatatcaccaggtaaaccgtaagtataatttctgacctcggtcagaaattatgggtagaaggtaaagtactgttctactcacagtagtatacaattggaatctctgaccatagtcagaaattcagtctatacattttttagggggtttatgaatttgaatcttctaggccctatttactattcatagatctaactggaagccatctggtaaccttggctgttttcgaatctaccctgaacggcctagcatactcccatcgaccggcatctctagaagcttatcatcctcttcaacagcctcgcatagtcgtttttgaggttattttccttttacccgtctacgtcgctcagcactatcattatccgagtcattatcaccgctctcagtatactgggtagcctcgagtccagtctcttgatcctcctccttgttatcactgataggctccaagacctcaagctgtggtaatgatctccgggtttaatctagcaaagtagcttcaccttaggatagatactctttaataatccctagctcctcttaccgaagatcaaagttagtagtaaactgatatagcattaggccacagattatactcggcttcaattgaccataacggtaataacagatatcacaagcacagttgaatagtcgtttaataccagtaccactagcagggatagatagaatgtcccttactatcctagctagggtcaggaagctcttctcatattccttctagaaaagtcgaggtttctatcgctcaattccacgagtaagatattgtgcaatctcgtcgttatctagttttataagctcttctaatagctggttctgggatacacaagtaatatcaagatcacagttatcattcttattaatagctactccagaagtctctagtgctactaggtcattagtatcataggtaagcatcttcctatatcgattaaactctcggcttaggacctcttaataacgatttatataatcaatatcaccctgccaatcagttaaggaaaagtaccggagcttctttaatagagagaagattgttactagagtatagatatcactataaggctcatagtcagtagcagtgtagtacttagagagctttttctttactgtttggagtgcccacaatatccgtttcttctagatcacacctttattcttaagcttcacctcggctgcatcgagataggagaaaagcttattatagatactatagatattatatgcggtaatatcctttatctttgacagtatcattataaaatcaaagaagggctttgttagaagaagaagatactcgacttaacgccactcttctggatcaagcttaaaataaagatattgatgattagtataatactgatcatagaatagctggagcttcttagcccagttgagcattaaaaatattaaattctatcatatctgaatatcttagattagaattaatataggctccggctgaagggccataaatacctcctgacgttatgggcttatattaataaagactgctagtccttagatcttctatacttttattagtctagctattataaggatctaggggtagaagatataccttttttaatatatctatgatctggataccgctagaggtattacacttattctagaaggagtgggttttttcctcagaccactctaactcaatctctttattacttggcactgccttaagcttcctaagaagcttatttagactcagctggattatatgcgcgatatatgggacacagaagattaagatatctgatgaatactaagactaaaggtggtcctagatactctgtatcaaagtattattattagttgcgttatctatagtcactaataggatataatccgagataccatactctgttaggatctaggtcatagttttactaagattttcaccagtataggagccatagagaggctcaaagcctagaagaaccttatagtaatcccagttataatcaataaagtaaccagtgatagttataaaggcctactagaaaggagaagtccagtaatctaaggctattgatagccgatacccctctagaagtctctatagaatccccttctagttattctggattattatatcgagataacatcgaatggtttatactaatggaattgtaagtttagtagataattgttaagcaacctctaatatgcagtagaattaggggtattcgatcactcgaaagggcagatatacagtcgaaatgaatcttagaatagcatcggagagatagtcttaggtaaatgatatactagtagtacctggctagatcaaagtactcaatattagctactaaattataaagaacttaactactgtagtaatactagttaagtgctctagttaatataccattcttttgagaagctggtcgattcttaggccacttttttttaaacatgctccagttttgaggtgtgctgtcataggcgaagaaccagtataccggaatcttagatagccaattgtacagagacataccttatatataacctttagctttccatttttattatttataacctggtagaagctatcccagatatccgatttactttttgattcctatcgaattgtattcctaacatcagactgagatctatacttagttataagctaccaactaacgaatttattacgtaagtcctccatattatcacatatagaatcagatagatataaaacccagtgcttttgaagggaaggtccgacgcaagtaagggataagggtataagggttaaacgagttaaacaagtcggcgatatcgataggactggtgtttagatacccaaaaaatcggagaagttgttagggtaaatccaatcagaagctaaatccacatctgaattagtgaacgagaactatgattaagacattaagaagttaacaattataatatatagtatagtagggtacttaaaagaatagagaggcttacatctgaagtagtagaggttttcaggggtaaagtaagtatactaggatattctaacttagacttacttttaatgtggtttacctaaatgattggctgtattatatattagtgcagataattagaggatatcctacagattttaaggatatcttaaggatattgaggatatcttacagatattttatagatattttgtggatatccacaagatatctgtaagacctcgaaactcgcaaagtccgcatttcaagaacttctatctcggatttctcaagttctaatagtcagaacaaattgaaaaaataatcagtagatagctaggactctcagcttttatttaagcctaaggttgaaataattcatccaataataaaggttttgattttccatattctgtttcttacaaagtttatcattattaacagtcgttaaatatatatttctatatataacttacaacaaaatcgtcaatctacggccatctttacaacaaaacgtcggactaagaaaactacgacactacctacaaatactatataaggagaccttcgatacatatctatttcctaaaatttcaaagggccgaccgttgattaaaggggttggttctatcaggaccaaacatgcgtttatttcaacggtaaggaaatattggtaagctatattaagatcatatgacaggctacaagggggaaagtaagcgagagttatgctagtgcggatatccaaggatatccgcattgcggatatggatatcaactcatatccgcagtgcggatgtggatatcaactcatatccaatatccgcaaattgcggatataaggatcgatctgatatccattggagcggatatgccgcagtctaagtataagtataaggtagtgaccctaatcgccttcgaccttaaaggtacttttaacggagtcaataagatcagcctagatacgtcgctataggtaagacggatcccgcttatagccagaaaatggattataagctttataagcgaccggcacgctaatatcgggtttgacgacttccgtacggagactactccgctagtgaactctaggctagcttaaggattactactttccgctatcttatttatattctttaataccgacctcgtagatcagcccgtcgactcctagggaggtatatcggcattcatcgacgattacttccgatagagagtagggggctcagtagaagagaatttgactaagatacaatccgaggatatccctcgtatcgaagagtaggcgcggagaacaggatcctgcttcatagcggagaaacccgaacttatctatctcactagaaaaaggggagaatatatagaaggacgaatcatctttaataggaccgacgtcaagccatcgcctacagctaaattactaggctatcaagcgcgccaccaaaacggcaatcgctttaagtggactacgacacttgcgcccagagcagatgcgacagctctaccaggcatatatcgcccctatagtagactacgtatcgacgggtaaggaaatattggtaagctatattaagatcatatgacaggctacaagggggaaagtaagcgagagttatgctagtgcggatatccaaggatatccgcattgcggatatggatatcaactcatatccgcagtgcggatgtggatatcaactcatatccaatatccgcaaattgcggatataaggatcgatctgatatccattggagcggatatgccgcagtctaagatagacgaaaacatctttcccagctaggtttagttcctctgtaaagtaagcagaggctattacactataactggcgagtaaagaccaccgttcgctacatatggaaagaataggtggtagcaggcataacatggcaaacgggagaggggaagctagctggcgatctggcaagatcacgagatccaccaagcgattccaagtggttctatgtaatatacggtactgtgacgatgactcattgctgaccatacaaatattacaatgacagttttgccaaaattctgaggcggtgacctcacccggcctagcgcgcgtcgggattggtttctccgaatcaagaagaaagagtctggaggtatagctgatttcgaaaagtactgtatgaaattagtttctggtacgaacctcacaaattaggctgcaacaatctgagagggtatttattcaattacgtaaacatattattttccctctttctatgattttcttacctataaaaaagcatttaatgaaaatgctgagcaatccagtttagtccttttacgaatgaaagaaccctcaatctcgattcttcacgacaagctacgaaatgggccaagttgtccaaaaaagcccagacgaaggtcaattggaacattaacatagcctatgatttgctcaacaagctattatgacagtcgttttggaaaccaaataatattgctcaccggtctatgccatagtattctgtactggtgtgaggagtaattttatcgatgatagctttaggagcggtgatgagccattttcaaaattttacaattgaagcacatgaaaaacctcttgaaggtatcgaaagatcagtcaagtagaattatttttagtcacaaatgaaatgtgccattatgaactaagaaatactacttggcagaactttgacatgggggtcctagttgtagatttaaacactatcgctatgtaatgaagtatgatgatgattgtttgaagctcatgaactgcgcattttgactggccaagttcggtcattgagatactgcgatctgtggaactagtcgatctacttgccgtttctccgcacttatatgagatagcagaggaagcgatagaaaatgcatccgttcagattaaacgatttcaccagccgaacttcttctgttcacggttacagaacaaaattccacgagttagataaacactccttggtgatgatctcagaaaataatgacttttgatccaaagaagcattcgcatgacctactactactccaccacctcagtacaactgcctcggagacaaccctcatccgtcagcccaatctggaaaaatgtaatgaattgctgaagctatctgttcctggtgcttccatatgtattgaagaagtgatgaaagatgccagagaaatcttctaccgaatcgcagtcagccatccaagattcctctcctctattccgtcgccagtatcgccactttccaagcttgaatatggtttgaccacggcccacaatcccttcggtgaagctgggaggcaggcgccagggtgtgtaccattgagagcggcttgacttagcggattgcagggatattcggcctaccgtcatcagcggttgggcattttgtctccggtgcttctatggccaaactcactgcgatgaaagttgcgcgagatcaaattctcaatgttgaagagcgttcgaatggggccgtctatatctcggaacaggctcatttgtgcattcaaaaggccctttgaatcattagcatttcgggccaagaaggcgaaatcaaagttggttgcaagttccgaatggatctctcactactgaagacaaccatcgatgacgacctttaaaatcatcgaaaaccatttctacttatggcaagctgtgatactaccgatactggaagtatgatggcttcaaacgagctcgcatgtacagtgcaatatcggaagatgtggctgcatatagatgttgtgatataaggttggtgcagatcagaaacaaaaaacctctgaactacaacaatagatgcagcccacagtggctcggtcgctttctctgtgactcatcgaccaaagaacaaggaaatctgcttcgcagatagtatcgcctgggatgctcataaatggctatctcaaagccatggctgcggcgccgtcttctttcgtcaccaatctcaatagttggaaagtttggacgtggaacgccaagaagggcttcccaacccctgagactggggcgtggaaaagacccgtccggcacaccatataagactgtggtttacattacacgtgcttggtcttcaaaagatcgatcaagcgattagccatggatttgagctttcagcgcatctagagtgtatgagcagtaccttggttgactgggagatcatctcgccgaggtggcagcctcactatgaagaatataacagcctggcgaagcacatctttataaccatgttgctgagctttcccaaccgcttcaaataagcgatagagtaacgctcgtaggtggcttacgagactgtggaatgcgcctgagagcgtttacagtacagagaaggtgcatagttcagaatctgcgatataagaaattcttcatttatgtaatctttatggagaacattttggccggccggtacaaagggttgattagattaggcatgctaaagaacagcttttagaagatagttgtattttaaatagtactattgtcaaccgagaagcagggattatcatcgataatagtcgaaagataatgggcaggggctgtgcaagcattaaacaatgcgtcgtctattactatttgtgcacttcgaccaaatctgttcgggcactttgggctcttcaattggcccacattgcaagactccattttaaatacgtgcccctgagctgaaaaccccgatccaaaatgattggccaactcaggttaaaaacatgacgcccgagcgtccgcttttgacatgtcatattttcagttggaccagatgcgtaagcatacggacggggttcagactggcagtgcaagtcaggctggtgctactgccaaaccaatacgatcaatttgaattggatcttcgttgatgagacgtattcatgaccacccaagaagaccaaagacttcagaacagcccaggcttcatagggcgttttgactttccgctatcaatttacccaggtgcccaccaggatcttctttatttcgtcgtttccattcaccataattctggtttgtatttgaaaataaccctgtcaagtcacattactgtggacaatccattttctagcgtttccaaaaggcccatgaattgcgagtcggggtacaacgcagcatcaggtccggacatcactggcgcaagacgagagcaaattcgcaatgaccaactgtatactcaccgagagtgtgattgatgagatgaaagaaaaaatgagaaatatctacgcagagctgggcaaagtggagaagagttgcaccgaaaagattgaagatgtctcacagatgaacgaaaacacgatgttatcgcatgatcagtggaataccatcacctcgttacaccaagagctcattgagaaacattacgacttttttgtggtttcacaagatctagcagccatcgcgaccataggaaacctggctgaaaagcacaacatgcccgcccgtatgtggagttacgggatctatcgttacctggaactgctacgaaaacatcgtgctcactcgctcgacgtgcaagaacatttgctaaatttcacacgtctatcatatctgatggtgacacttcttttggagaggatatcgcctttcagggagatctggaccgaatgcctgggcgatctagcgcggtatcgtatggcggtggaggacacagatggagcggatcaaagaacatgggcagaggtatcgagattttggtataaccacgctacagatcagtgtcctgaagctggtaggattcaaaatcacctcgctgtgatctcgcgcccggatacattgcagcaatttttctattacaccaaagcactgataatcgcgcgcccattctcagacgcgtgggcaagcatgaaacagctggtccattctattcctggggcaccgggtgataggaacatcttggtcaattcttttatggctgctcatggtgcccgtatcttggacttgccagttgagcagttcgctcttcggtcgaggatcttccttacgaatctgcgccaagacgtcggccgtttaggtcaagaagcacaacaaggcatctttgttacatgctgtaacatcggtgcaatacttcaatatggcaacaaagatggtttcattgccacggagttcaattcaaccgacaatactacgcttggagatgcctatgctctcgcaaaacagtgggcgtctaaagcacacgtcgacccaaacagccatgtcagtaccgatttatcatctcaatacgcattcagtgcaagctcattcgcttttcatactttggccatcatcctcaaccagcctgatgactggaacttgcagcctgctgtgcatgtctctatggccttcctgtggtgccttacgctccacccagcagtcatccagcgacttgagcggctggtcccatggtcgatacttgccaactacctgaacagtctgtttcagcccaacgtcaatatttcaacgatcaaaggcaaatcattcccccgcattgatggcaccaccccacagcagctgccggaggaccttttaattagaggccacacttggagccgactttactaccctgccatgtttttcgacgcgacagccatggcagaggacaggccattgattgaggatccttccacaatgctccttagagtacacaggtgcctgtggcttggaatgcagatcgcatcggtctgcctcacccgaattcactataatgtactctggtctaacctagttctgatttagtattctcgttggatgaagtacgacgatattttacggttcacgcctaccagacttgcatacgaatttgcgccaatctctcaatccctagaccacctcagtgggagtctctactcgacacctaggctcatggattaggaaatgagggaagctttgaaaaacccacaaggtgaccatcatctctcttggtcggaagatagggaccacaatatcaactatgtatagtgagtaaaatcgaaacagtagtcgaagatttctcttttgcggatcagaaagcgcatcgcaacctgtgttttcataaatgtaaacgcaagttgacacagacaaattgtataaatgcggcagactcggctttgagtcccacgtctggctggtagctctgagttatttcatagttgagccgtcgagaaagatcgctcctgggcgcgggttgagagatgaggacatttgcaggccaatgttactatgtagctttttcattagcctcactaggcgcaaatgcagcatcggaagaacgaaagtctggaagcgctgagagaaaaatctcttgacagaaaccaatgatcaaaattctacagttactagtggtagtatcaagccaactacctgactaccttgacgctacgaggtcgaaacttcaacacaaaacctttctagccttgcatcaacgtttttttcttggtcaactgctaagatcttgaaacacgagacactgattctctaagatgaacgaccaaccagaagtgaagtcccaatcgcccccaacactatacttcgcacaactgtgccaagactcctgtctcatccccgaggtttcaatagtgatgctagagggttcatcaattttgcacattgcgacgttagcgcttttgcttactgcgccagtccttcagttctctgtcgtcataaagagagataggcatatgagcagctagaccctagagtctagaagaatagtaagcgttgcaccttcttctataagaacaatcaaactaccaagaagcatgcacttcgagtacacccccggacctcggtttgacggtggtggagaaacggcaggcttctcaacacctgttgtatcgtacgcacctgaggcatgtcacaaagcaacaacgtatacagttttgaagatacattctccgatcaagggacacaaagtcctacctgtggagcgacgagtgatatcttattgggcaatcacttacttgttaattagcaactcatccgcatattacctgtagtcgagtagggtgcacttactcttcttggccagccactactatcttgtggatacacattgtggagatcatatggcccgcaagacagccacatggacatatttatgacctctctgaagcgagtatcagaatgacaaaatcaggggctccaatattcaggtctagaatgtatgcacgggctacttgggctacttgggctacctgggctacttggccatcgatcgtataccgtattctaatattcattcattatggatggggatcgggcgtgtagagtgatatatagccccgtcgaataatgtgtggctacatcaaggcgggacccagacggtagtgatcaacgctgagatgctatagttgatcaccactgttacttcgaccgccgctgccgaggggtccaagctagccggagcttagaggcctacttaaggcatgaacacttgtgagcaagctcattctccaaaattttctttcattttcattcatacattcatatggcttcattctgcatatactggtagatgatacatccaattctcatcgactctggttttcacacaatttgcaattgtttccatctgaaaaatgacaaacttcactgaccgcgcatctgatgaacgcggtactcggaccttaatactcctgtggatcacagcaggtatcgcacttgttgttatagctttacggatttccagaggggtcaaagaaagatatatctacgtggaggatgttaccatcctagcatctgcagtgagtgctccgctcatgtaatttgcagcataagatatctgacctcaaatacaagattgcggcaatagtttactgtgctaaaatcacaaatatcattaacgcaggatatggacggcacaaaattctactgggccaggaagaatacggaaatgcaaattccgaaatgatgtactctcttgtctggggaaacatctcgacagccgtctgcaaaatctcggcggcaatattactacaccgggcggtagagatcacaactttcagagtatgttcaatactgctgacggcattcggatcggtggtatcacttgcttggatcgtgctgttagaaacgacctgcatcccttctcgactgttaccaaagataggagtggctggtggaggtgggtactatctaatattttctatcagcaggatttgttcaactgatggattgcagtgctatcaattctactctatgttcaccttgcaggtaatgcgaccattgtcgtatggacgcgggatgctcctctccaaaaaaggctgattggttgtgctttttgtgggtcgattgccctgtaagttgaatcaagttgttatgtttttaggatgaagaatagaattaacgtgaattgtgatagagctgtaccagtggttattatcaaatgcacgaatctcaaggctctcgctgttgggcatgacatgacatgtgagctttccctttggggagagggggtcttgaaaccgacctatgtccaatccattttctgaggggaaagagctgatgattgattagatacgatggccccattgctaatatggataaagtgagatcattcgtctgatctagtgaagcacagctaacacttgccggttagcttggaattctgcgtcttttctatcgtttcaagcctggggcctcttcgtatgacctttttcaaggcgaatgagcccgaaggcaacactacaaaaagtatcaatacagtgagtaagtgcttctttcctcagctggtcaaagactcacagacttttgtggtaccactatagtaaggctttgagttgatcccaggcgctcggcaatactatcaaatcacaactcggggggaaggcatggactggagcctattcacatttttcatgacttgttggctactctatttggtttgatgtaaaacgaggttggttcatctcccagtgagggaacagcataccgcatccctccacgtatcagcgcatcttttataagataacgatttttgaagccatcgttgatcaaatctagcacattgtctcagcggttaaacgagcacataattctgtatgcggcatccacaaagtgatctattatcttggcaacagatcgcggaactgtctggatattgagcgatgtgttgctctctatcaaaggccgtgaagcggagagtcatggagtggaaggcatataatgagacgccttctgaatgaagaacatgtattttccaagttttctatctcattcaggaacgattctttctatataaaacactaatatatagctttctatagcaccattatattcaatcctataggattgtgcacgccctcaaagcccatacgcattcgctccaatctatgcccaattcacctaatgcccggctgctgtctttcggatatgccaatttgcaggttgcaaaatattttggatcctttacgaatgatgaccgagctcagattcacatcctgtctaatacaaataaccgccaacccagaaatgttcaaaattcaataagagtggttggtagagctccgcatcaaccgcggttatgaccgctgcggtgcgtttaggtaaccgcgaaaacgcggttgaggtttgggattttcctatatgcggtcgctcaggccacatccagaaaccgcacatggtcaacagcgggtagaccgcggttgggcaaacgggccaaacagccaagaccccatgaattatacatattttatgcagaccacgacacttggatagtataaaagctgataaacatgtaatcctagatctggattctttatgaactcaagataactgagcttttcagcaattttgtgcgcctgacgatagcttaattaggctagttatgtatttgcggtctctctgcggttgaccgcagtctgaccatgcgtttttttagtgcggtacggtgggaattttgcttaaccatagttagcgcggttggggggtgcggttgggctttgccttcccatgcactggttgtgacgaggtccatggtggtgtgacagttcagggactgggagcagaagaggtcgacattggaagaaaaaactgggtaaattggcctgaggccttttaagtcgtagaggaagatggggatctcagccttctcccaaacttctttcctttccttctcatcttgctttcttcgtatcgaacgacccagaattcaactgaatttattggaaattgcctcatcacaagtgggcaaaatttccaaatgggtaataccctttcctatcgcacgatcacaggtaatctttaattgtcaaacacattacgcttttctccgagggcagcgctatttcgtttttgagtataaacataactcaaaatggacttattaggaagatgggccaggtcgggttttcttcattggattttgggtaataccatctgattcgaaaaggcggctacaggaggaaccgcttggtcaaagtcatgtaatcaagcagcagattgatgtatcgaatgtctccgcgatggcctgccatccataggcttgaacgcggttttccgccgacccagtgcactggaaaattcgttctctgcgcaagcaatgattctatcacgtcagaattttcgaagtttgacggcgtcggccagaacagcggtaagtttcttttggtctccgacgtgcatataatagtgacttcagaatttctaaaagaggctctgattctccctccagggggattttttttccaccagacgggggaaaggtttcaatgtttccaagcaagtctcgcttcgcttttttaacctcctgaaaccatatagttgtcgctgaatattggattcgacaaaattaagacttcattctccagtggcctttcaactgactgagtccggtgggtgtactcatccacgatcgcctgggttaccaacatatagggtaggacatcacggattatcaattaactataccacaaactcaacccgtgaatatcttcctaatgatacattgtgatcaaaatatgtctggtttcctcataagctgcgacgacctttttattcccaaggggccgattgaatttatggtcaaaagttgcatatagaagcaagctaacggcacgaaaaggtttcaataatcaatgcgagtggcaatagccacggccagaggggtcacattcgtttgagttgacgatttgcccaatgaccctcaattatcatcaatttgatgtcggccaaccactttgccaacgttgtcatgctcggcagaacttgttgctttttgtatccagctccgaggctatgtggttgaaaagcaaggccaacaaaacaagaactagcagtcatccacctcgttccatagcagggcgttagtggagttcagccagcatgatcaagaacaataagtctagtaaatgctggtctttcatcaaacagccaagcttgaaattggtttctagctatggactttcgaaccctagaagtaagaagcggaatgagctaggacggaaagagctggtggccgctggaattcagaaaatacttcgctagaactcctgcgcgaaaatccggggtaacaatttaactgtgccgattgatcagccctatgtctccaccgggctggcgggtagttctgtgtaagacccacgactgctgctacaaccgctaaaatatatcccggcatctgctcgaggaacaccgccgacaaccccacagcaggttgatgttgaagcgcgtaacttcttctaaacaggtagccaggtgcacatatgaagtcttccaacgcccagatgccgtagttctcgaggaggtcgaggaagaattgggcgtccgttttgaccgaatcaactccgacggtgttgaggtaactatagaattcctcgtagaatcgctggatatcatcgggatctatggcaagaatcttgccctcgggaatattttgtgcaattgggccattggagctgggatctttgacttgtacttccttggtcttgtactttcgagcgaggtcgccatcaggactgattccaccccaatacccgaacaaggcatgccaaactgccacatgctgaatattagggtttttctggcggatttcgtcaacggttcgtttaagacctcctgggaaggctttttcgtttgcctcgaaccgctgccaccgtcttctgaattgggactcgccttcgttgtcgagactctgccagttgtcgtcgataatcagattcgagatgctgatgccgtgagacttcaaagattccaaggattggagaagtttttcctccgttagatcctgccccaggctattccaagtacaaaatgtcaagtcatcaaaccactcagccagccattgtattttcgggtctttctcaacaaagacaatatcatcatcgagaggagatatcggagacgtctcttcccaatcatccattgaagagtctgagaatggcttgaccaccttccgcgactcatagattaaagcagacatagcgacttcaaagtcttccgcaacagcagccaagacattgaattgggcggatttcgtgttatcgttcctggccttgatcacgacctcgccattatcgccagactgaaaaaccgtcaagacatcgttgatacctgaaatggctagcaaaacgagattcagaccatctttgcgcaggaaagagcatagtatcgcatcttccgtcaaatcaaaccagtctctaccatgtcgtggccccagccacggactccaaacccgcaccaaggaaaagttcctcattattgaagaaggggtaccgagaagaagagtactgattccggatgctccatttgctgctgcagacacatttcctgatattgaccatagtagagaaccgggggcctcgctggtccgtgactcgacttggatatcttgcgaaaggttggtgatatattttgcgagctcttctttccgaacctgagaggggaaataaggtgatagcgctttcttgattccggattcgcgggcagtgtatacgatttccccatcaccgaccgaatgatgagggtttacccattgccaatcggtttcggggcttgtgcgaaagcgcaccgtgaattgtgcatgcccaccgactgaagggagttgaatctgtcctgcgaatatgtggcgataatacctatattctgtggcgtttccactaagcaaaggcgcggctgactgtttggtttcgtgcagtggcagcgccgtccagtctggatcggagatgttatgccagatttgagcttcccagggttgatctggtagagatgtgcttgattcgatggtgacggtgaagcgcacctagtccagcctttaatactcgatctttgtttattgtattattgtacccaagacagctgattagtactcaccgtatcgccatggtccttctccgaccgcaacttcttttggactctgggaatgctggttacttgacccagtggagggtagcacgtcacacgggcgaaaagaaccatctggaccgggcgagcaaagtgcgggctctgatgtttcgtagaatcgccaggtccgattatggggagattggaggtatttctgtcaatttgctcatgcatgatcggatgggaggggtaagctcccagctctctcgggtgcagggattagattaagctgtagctagccgattagcgagcgtcgagttgagaaatcgaccaggccggacccgatagctgtgaactttggacgaatgacaaaagatgaagagggagagggcccggggatcttgtgatgtgctgagggaagcagcggggaaccttcctcaacgtctttgactcttcggcttctgtgcgctacactgcatcctatctactatctaccttacgatgttcgatcttctttgttccatgcacggagatggagtatctgtagcattgcttttgtagctgagtattccttttgcacttcctacttgatttctagtgaatcctgacagccaccttgccaaagtgcttttgagcccactatttcccagttagtacagatatccttttacacccaggagggaacagttcacttcacttaccatgtgttcatacgcatcccgggtttcagccagagaaaagaccttatggtccacaacagggtgaatatcattggcttcgatcgcgcgaatcatatcccgcatcagcgccttgctcccaacataaacaccgcgaaccgtgcagatgttgctcagagtatctagaacgctaggctgatcagcaggactgacaccacccaagaatccaatcacactgatcactccctcgaatttgatggccttgaagctttgcttcagggtgccacttccaccgacttcgatgatgtggtccacgccggcaccatccggggtcaacgcgcgagcagtctcgccccagttcgggtcggtcctatagttgattatgtgatccgcacccagttgcttgagtttcttagctttctcgtcggatgaggtcgtggcgatcacgatcgcacccgcagctttggcaaactaaccctcacggatattgattagccaagctgctctttgataactggccgttagctaccatgggcgaagcaatcacttacctgaagagcgaagatgctcacaccgccagttccctggactagaacgacctggccaggcttcaacggccttaggtcgtacagcgcattccagcttgtcagagccgcgcatgtcagagtactattctcaactggtgagaggttcttcgcagccttgacaagacccttctcggcgaaagcgccgtattcgcgaatggtgccgtcgattacgccgcctagtccggtctgtgtcgcgggaatatcgatcgggccatattggtgaccctggttgaagagcgtcgcaactttgtcgcccttcttgaactcggtgaccttggagccgacctcaatgacctcgccagcgccgtcggagcccgggaccacagggaaaccagaagggaagggatatttaccctgtgttgtggtgtggtgcaattagttaactgtcaaactgggttgctctatcgtgctggtattcttaccaagggaatgattaagtctcggtagttgagcgaggcagcctgaagcttgaccagcacctctgattcaccgatagttgggaggggcgcgtccttgaaggcaaggccgtcgaagccattgtccttgttctcgactacccattgcttcatggttgaggggaccattgttttgtacgacaattcaattgtaatttggttggattttggagagagagaggatgtgtagagaaattggcagttgcgatgagttgaggtgggactcggaggggcatatgaggtcttctataaatgcccgcgaattgacgtgggcgatctaccgattattacgtcgaagatagggagtacaggtggtctaggctgttctcgggcagatgagagaccgttctcggacacatttcaatgctgatcaatcccggttcatcctgaccataaccatccatggcttatcctaggctcatgacgtcaggagtatggcgttatgacaatgatacattgttagaaaaaggagagaaggtgatctagaagagcctctatgttatttagtactaaatgatatggcaattttaatatgtaaaatctattccaatcaaattacacgcccgtcatgtccactcttccccagttggatgtttttatctactctgtgttgaaaatagatattaacctgtcaccgctggaaccattcgccttttcttctcggcgttcgggttttgaaaactttaaattagttctttattctccaaatatagcgcaattggactaacctgtgcggaacatcaaaacgtaagttactccggagcttttgcttttcgttgttacttcggcggagcggagcttcgggatctgaaaacatggacccactgggaattctcttggtcctgcggttattgcaagttgcagaatgagaaaatgacggcagtcagcatggaatttgtatcaataaattaataaactataaagctatcggagagatatttcaagtttacaagatagctctgatcaagtacagttccgtagacattctatgctagcctcgcacttaaactatcccatggattaacgatgatccgcttatcgcgacaatctcggagctggcctgatcgccggccatttttggtctccgcgactcattcctccaattttccactggaacgccctccctccttacccatttcacatcaatcggtcccatgcgacctcggtcaacgcctcttgttcgcgcgacttgtcgcaacgcgcccctacctcgaaccgcgtcatgcggagcacgtagcttcgccgcagcatcgcaaacaaatccgctccgttgcgagacccgtcgcccggctctgttttttcaacaatcccagtgtacaccgcagcagaagaggctaatcacgcaacaatggctgaagcgcgttcaggatggcaaagatgagtgggctcggcatgcggaggagattaacgagggcaagaggaagagcttcgcggctcatctggaagaacgcgggttgattcatgatgttgttgggtatgttgtgagctggaatttattcggggtcctcttctgcatgagttaattgggaaacaagtactaattgtccatttctgatctttccagagaacgcgatttgcttcatcaggtgttcaccgagaagagggtcggtatctacgtcggaattgaccctacggcgccatctatgcacgtgggacatatgttgccgtttatggtcctggcttggggatatgtttggggcttgcctgtcacctttttggtgagtttctttgggcctgagagtctcttgaaatggctgactgacacaaaatagttgggtggcgctacatctcgagttggtgaccccacaggtcgactaaagggccgcgaaaaagttcatacctcgattcgcaaggcaaacatggctagcatgcacatgcaattgaagaagctgggcactagcattgagcagtacggcaggagacacggttatcagaaacaggctatctggagacgagcgttggtcaacaataacacttggtggaattcaatgcctttcattgaggtcctgcgcgatctgggcgccttcactaggctgggacctatgcttggccgagacacgtgagtcttatcaatgcaatttggctgttcagttgaactaacaattatattcagtgtcaagaatcggatgaaccagggcgatggcatgtcttttgctgagttctcctaccctcttctccaaggctgggactggtggaacctgttccagaagggtactcaagtgcaagtgggtggatctgatcagtatggaaacatcctgttcggtatggatgccgtcaagtcaattagccgtaacactgccgatgagcaaaaacgtaatcctttggactcggaactggaccgacccattggctttacaacgcctctcttgacagcctcgtctggagagaagttcggaaagtccgctggtaatgcaatttggctcgacaagagcatgactaccactttcgagctttaccaggttagtttactcgttccatgaagcttctgtttcgtctagagctaattattttccagttcttcgtccgcacccctgatgatactgtggagcgctaccttaagttgttcactttcatccccctacctgagattcatagagctcccaagcttgagcgtaggagcgggatgcggactggggggctgtgcggttatccttcttcccaaattctaatcgcgtttataggacatgaatatcggttgcccgacccccgcagtaattgcgcgtagtgtgtcaagaccgtgtgatttgaattgtgaatctctttacgcgaagcctcacccaatcactgggaaggtcagattgtggagtcttcttggcatcccacacgccgtccttcaaatgccatttgaattattatttcacgcacaggtatgcgatttagacatcagtttgctcgggtgctgggaacgtagtatcacggttgttacgactgaatcatttcgtacgatcatcaggtaaatggttctattctggccgttctatgaattctcaagagttggttgatctatgattcaactgctgtaaattcggtggcttggatcttccaatcatcacgaactcggtaattttctccggatagcccaataaagcgcaagtcatgttatggatataacactggttatttccattgccctgaaatattcaatttcgatataggaaatgattgacagagctaagttgttgggtgcgtcttcgaatgtctgctgttgcccggcggccggggcgtcgaaactgttaagagtggatacttcgtattgtaagtgaaagtggcatcgaagttttcctagtgccgatggttcatacaacacctaactagttgattacatctcgctgaatcttaactagttataggaactgctgaatctgcaggacgctcttactcactctagactattttccatgtatttaaaaacacatttcaaatgctgtgcaaatggcctcatgccttgttaaagtactagtacatactgcaacggattcgacacgcattcatggataatagggttttgcatgaatcgtgggcacgtgaagacattacggaaaacacggccccaaatgtgtcatgcttttcaaatcccgaacatgcgccattttctggatagaccaacccccttggcagaatcacaggggtcggacaagagacgggaagtgaccgttttagcgtccgacaacctagggtgaatctagggggtagaatccagagaaatcatttgacatgcgttacacacagtgacacaacaaaagcctgtaacatatctgtcgattcgtaggatatccgtagaagctagtaccgagggaaccaattgtcatgattgagagcgtctcatagcctcaggggctagtattggcatgttacaatatggatattccgaattaacccggtttaccatacaaaaacatattgaatgatggatcgctgaatcagcctgtccttattggtaactaagttatctcagtacctcagccgctccacgtgacaatggtggcggtataccgccttctgtttcgagcgattgttgaatcagcttttttgtggaacgtctgagctcaaactagtatggccccttataatttatcggcaaaatagcggtcaacactaccaaattcatcgggaaccatattctttaatctaccagaacaatcgccacaacggtgatatcgaaaatcgagcgatcacgtcttctagatattgacgagctgaatacgttgatctaatttttttgacgcgaaacggtcgattggggttggtgtgacacggtaaagtattgcttgaaacccccatacaaactttgaacctcgctggtggtacgaaacatgagaataaacactaacaatttaatatatatatatatatcaggcaattctatacggtttcaaaggtcaatacagatcgattacgttgttttgtggttgggatacgcattgtagtcatgcgtccacagaggaaaccgcctcggtactggcagcgcctccggaacaaccgcacccgcgagcaattgtcatctgatattaggcctggggatcataattctgcagcagttcaaggcgatcgggaagcagttctaatgacactggcctgtttggactttggacactgagttcgaaaaagctgacgtggtataacctctcgcattccttccgagcagataaagcaggcacaggatattatcatccgggctgtcagggaaaatcgaccctctcagatgaaggcaatagaggaagcaattgcaactctgtacccctacaacgcgaagcccggtcagcgggaggcacttcatcatcttatataccaccgcaaggatctcatacttattgcgggtactggatttgggaaaagcatcattctgcaagctgtttcggtcctcctccagaagtcaacaacgattgtcatactccctctggaccaaatcggcaacgagcagtcggattacattcgacaaattggtggcataccgtgctttttgaataaagacacaatttgccccaaacttctcaatgaagtacaacatggatgctttacccatgttttggttagcccagaacttgcaattggtgaccaatttcgacctgtggccagtagtccatctttcaaacaacaagtgagcttggtggttgttgatgaggcccatctcgtgcatcattggggtcgaaactttcgggctgcatattctcgtctgaatctgctgcggagttggttgggcagtcaaataccctggtttgcctgctctgctacattggatcccgaaacactggaatcactcaaaagcggtatcagtttcgatccagatgttaaggttcagcggacgtctattgatcgacccgagcttctatttcgaattggctggattccgaagaaagcaggatacaaaccattacggtttctgttcgctgctgatgagaaaaccacggaatcagtataccagagactcagtgagattccaaagacaatcatcttcttcgacagcagaaaggatgcacatactgcagcagaggagtgtcaggcctggctgcaagacatcaagcctgagtggacatatgacaatgtgacgcagtcactgaaaacgttccatcgcaacacagcatctgcgaacaaagacgctattctgactgaatttgggaaggaaggggcccgatctcaggtccgagttatctttgccacagaggctctcgggatgggcgtagaccttcgagacattcgtcggaccgttcaatggggcgtccctataggagaacatgctgctactcagctgcaacgaggcggtcgagcgagccgagataagctggatggtgagatgatcatgctacttcctgaatgggtttccggcgagcgttcctctgggccgaaacaaaggaggagtcagaagcaaggccaagggcctcctgttattgatgcaatcgacactggattaaaacctgaagaagaggcccggaaagcaaagaaattgactgataaacaacgtcgtgatcacatatccgacttctggtataacctagcgaattccgaacgcaaggaccctccaatgtgcatccgtcgccaatttctggatttctttgatgagcgaaacgaatatcagtcagggagacgccccaaccgctgttgcagtaactgcaacccccacaatcgactcggaaagctggatggcttctatcaatatcacgaactcggccctcaggcaaatcaacgaacaagacgagtatctgaagctctttctaaatgggctgaagagcaggcctgtttgttatataaggactgtgcattcttaccagaatccgcgcttttcctatcgccagacttgcgagataagcttgcaaagaatgcacattcggttctcgacatagagagtttacggatgctcatgggtccatggtattggagaaaatcgcacgaacaggcccttttcgatatcatctggacttcatatcgtcaagcaaacgccaagactccaagtactcaggccagtcggtcacagactcccgggttgagcagccagtctacacttattgcctgctcatttgacttatcaacgccgtctacatcatcacaggactccggcccgaggaactatcaagttgttggtttgtctccgctttctacaccattgccatgggattcgccaatgcaatcgcaggattcctgccccaatttattgagcaaggaaaccgtcaatgcatcaccactatctcgacctgtgaccttaaagcgatcagctcttgaaccaatatccggcaatatacgagggaagaaaatgtatactcggaacacctgactccacctgagccggcagtgagagtctgattcgaggttcggcagtaggaagtgggtgatatctatggattagaaacagctctttttagtacacatccagagtgatgggataaacatcacccatcaactatatcagatcatcaacgttgccatattcgacttatcctcttcaggttcctttgtaacgtaatcatccaagaccccgatggaggtcgaggctaggcctgaactatcgtcaagttcatcacctgtccattgcccatgaaccaccagcttgttgaatcgtatgaccccattgacaatcagcgcacaacctcgggatacaatatctggtggttgaaatggagaatctctgccatccttgcgctcatcaatagaacctgaactgtatatctgaaaggctaggtttcgcacatcatcgctcacatcctttgctgtatgtgtgctgttggtatgttcaccaaaggcctgttcaatggactccttcaggtccgtacagtaactagctgttaaagcagtggtccgaaataacgtagcaacatcaatgctcgatgtgcgccgagtggccataagagtcttcatttgtagattgaagaattcattcagacggtccatctcgaaccaactatcctcggctccgcggaggttgacaagcccatttgccaaaatagcatgttgcaattcttgatcggcagcaggagtctgtgttatccatgtcatataaagagacaagaaggcatatttggacttattactgccatggaaaagaagacaacaccgagcaaaagcccggcgtattatgcctatgtcagcccgcttaatggcaagcttaagagtcttgtagatttccatttgttgaaggaactttgcgtgggctgagtattcaacgtcaactggggcaccttgaggctggggtttgtttcgatttgcagaacttgactgctccgtggatgctctgggtggtttcgggacagatttgtattgcttgtcaaaagcaaacatagattctcgtatcttctcaattgtgttaaggaactcggcccggcccgattgacgaatatagaggtcaacttcttgatgatattgtcgtttgacacctggaggaaggaactggtagtatagagcagtcactcgggcgttaaaagcatggattgcaacctctaccttgtgatgaaatggacttttatggccctggacgcagccatgaagttcttattgtggtgtaacgtacaaccgatagaagcactctcaagaccggaatagagatcatgaatcatatccatgtaattggtacgccaatgaaaaaggccggggatgggtaaaatccagtcatgcttgtcatatgagagtgtagacccccggcgttctttctggacggcccggatcaacgaaatggttttttgatccccaaacaccagatgcaagatgtcattgaaatcactagacggatcgtacccaagttgatctgtaaagaccttgtcgatcacattgtaagtgccatctatagtgccttcattctcaagaattggtccgagactgtagtgcatcgtcttctgaggtaacaggcgttcaacacatgggaattgcggccactcaacaagctcatcggtaaagacatcatggatagcatcacgatgtgtatagcgaatagcttcagcaatccaatatcgttgtgtctgatgaagtatctcatcatcccggttaccgggcattaaacagacgtcgtttgggtccaatgagagatgtggatgaaacatagacttgcgtagaccaccacctggcatattatgactgatacgcagcttgcctgttgttgcacatatgtgttgcgctgggttccgaagactctgatgccgaacagtctcactgtaattgtcaccttttagcggcagaccttcggtgcctgaaacctaaggttgaaccacacccccccggggnnnnnnnnnnnnnnnnnnnnnnnnnnnnnnnnnnnnnnnnnnnnnnnnnnnnnnnnnnnnnnnnnnnnnnnnnnnnnnnnnnnnnnnnnnnnnnnnnnnnnnnnnnnnnnnnnnnnnnnnnnnnnnnnnnnnnnnnnnnnnnnnnnnnnnnnnnnnnnnnnnnnnnnnnnnnnnnnnnnnnnnnnnnnnnnnnnnnnnnnnnnnnnnnnnnnnnnnnnnnnnnnnnnnnnnnnnnnnnnnnnnnnnnnnnnnnnnnnnnnnnnnnnnnnnnnnnnnnnnnnnnnnnnnnnnnnnnnnnnnnnnnnnnnnnnnnnnnnnnnnnnnnnnnnnnnnnnnnnnnnnnnnnnnnnnnnnnnnnnnnnnnnnnnnnnnnnnnnnnnnnnnnnnnnnnnnnnnnnnnnnnnnnnnnnnnnnnnnnnnnnnnnnnnnnnnnnnnnnnnnnnnnnnntccggcggtcaacggagtttgcttgtcaacgaagcttttttttattttttaggtattttaacccacaacgccaaatatataaacaattaactataatcctcttctaggttaggcaataacggagggtgttcgacctcgaaattgtctaatcttgcgcgagaagcatcgctcatggccgcataaggtagtggattgcgtaactccgtaagcgcttccttgatctcttctgccttttttcggtcacgaatgtggcgatttgcatctttagtggatagggcaccaaatttgcctatttgcttttgcgacttgcgtgcaattttgcgttgtttaggcaatctattctctagggtatcctgtagtaggcctttatcctccgcaagctgaatctgggattgggcaacacgaagcaattggtcacgtatatcagccggaagaggtgatttatcaagtatattgaccattttattgcgtgttcgacgtgcatcccatacagatttaggtggtgtataagggatactagatatttgctctggtggtggtgtaccatcaaatatcttgagatccggctcaggggtttgtgcagccaccaaaggctcaataactagcttaggattgtaaggatagataccacgtgtagcaaatgccttccgaatagtacgtggtgtcattgctgttgcacgaattgcggttatttcagtaaaaaagaccgatatatcgcgggcatcaccaccccattgagcaatctcgttatttttagttcgatacgcttgtttcagcgctcgaaaaggagacccatcaagtggttgaataaggtgggttgtatgaggcgggcagacgtatggaataatattgtagaagtcacaaatatccaaaaattcgtaggtgagatgactgccatgtccatccatgatcaataggcggggctcttttgtactttttcctaggcgatggctcgtattttcggcaaagaagtgcagccaatcgattgccagtagatcattcgaatatccagaatccgaaacagcgattcgtgtctcctcagagagctttccaccatcataccatctgactagatgggccttccccggagcaacaaaatatggctccataacccaaccatcggctgcaacgcattcaattccggtaaccaattggcctctttcaaatgaatgggttctggtacggtgcttattggctgaaataacgttttgaggcctgccctggccaagcagaaagccagtttcgtcaaaattgtatatatttttggtcggaatgcgcttgataaatggctctaaacggtcataccatgccgttaaaacaccaatatcctcagcaaggatacgcttttgatccgcaggcttctgttgcacccaaaaaaggtcttccggtaggtgttgagccacaaaatcgtacacccaatcttttgcaagtggacgtgcgtctgaattggccctgcgtagtaatgcatttgccgatatagccaccattttagccgtaggtggtacatgtaggttatcaaggcacctaatccagcgtaccaatgaggctatttgatcctcatttaggcgggtgtaggtcatttgacgagtactacgagactttcgaccggcaaagcgtgcccgcaatcggccaacgggaacctcatattcacgcgccaatgcagcgaagttaggctttttggaggttctagcaactgagcaagcagtcaaaatacgccgttcaacatctgaatagggtttatccatggtggtggtagttgtaggtagtaaaataggagcaaaagctttgttgacaagcgaactccgttgaccgccggttgacccgcgcccccnnnnnnnnnnnnnnnnnnnnnnnnnnnnnnnnnnnnnnnnnnnnnnnnnnnnnnnnnnnnnnnnnnnnnnnnnnnnnnnnnnnnnnnnnnnnnnnnnnnnnnnnnnnnnnnnnnnnnnnnnnnnnnnnnnnnnnnnnnnnnnnnnnnnnnnnnnnnnnnnnnnnnnnnnnnnnnnnnnnnnnnnnnnnnnnnnnnnnnnnnnnnnnnnnnnnnnnnnnnnnnnnnnnnnnngtttttgtttcaaccttaggtttcaggcaccgaaggtctgccgctaaaaggtgacaattatctctaattacacattctgtaaatcaatgtatttaacgactctcataagtatttatattcaatagggaaactaaagactactgcccgagacctaaatagcacctcctctaaacaactaaacaaagataatttgaaaacattatgtcgcttttcgtgaccgggagcgtgggaatcggttcgtatgtgaatattgaaaggttttggtggcataatcgtaacttgtccgccatgtctgaatgtgcgtctgggcagacccggaatttttcggaattggttggatagttcatgcgcgttttcgcgggcgtgatgttgagtatcgcggtggtcaaagcttatcgcgggactagcgatggacatttaaatagatggggctcccacctttgatagtaacctcaacaagaacattacaactacctatctcaacaggttatgagcccggatggcttcacctttgggcactcaagaatctaaacagcaacaatactttgcctgccattacagctaagcttctctatcagagactaactctatgagcttcagaaactgatcatatattctcagtaacttgatgaacaatatgaagtcctattgctcaaaccctctgggagcaataacgcgtttggactttccttcaccaaagaattacagacatcatgccatcattgctactgttacactgtcacactggcacggagtatcgcagggttgccccatagccggcgcatgtcaccgtttgcagcaagcttcaaacgttcctctgccaaatgatcataggtattacaccattattgctacggttacactatcgcactggcacggggtaccttcgagttgtacctacagctgggacatgtcaccatttccagcaaactcagaaactatcttcttggggccactgaccacagggccacctcaattccggaataaaaatgcggggaaaattacaaaagagacacttcgcgtcgtacctccgacacactcgccactggcgcttcaaacaaatccaaacgtcatacttcccatcactttctccgagcgcactcttgggagcctactggcgcctgtccactgaagaccgcatacgccgagcatcgaggaccaccatcccaatcaccgctcctcgcaacactgtgaaagacttcccaagtgcccccaaagctcaacctgcgcgttccagtatcgagcaagggacaagtcgctacagttgctccgcctctggcactctcacccggtcagaaaacaccattgagagtttggtcttggccccaccaagccctgcgggtggaggagagccattcatttccaataacagcaactcgagtcgttacaacctccggccaaacagaccctcaagcttccctccaaggaagccgggatatctagttgaccgacaccgtttccctcacttctctagatcgtataagtactctctcgatctacacaggttgtcagacagcgactatactcctccatctcagacgcctacgccaagttcatcagaccgaagcgtttccattgtttcaagccttcccagtaccgcgtcaagccttgaactcttcggcttggaggtgcgctctcttcagtcatcagatcgtgaatcggttacctctgatcggcccaacgacgtatctagccctgacttcttcagctccgaggagcatccattgccaacatgactgaaatcacaaaattcgagcaatttggaatcaatacgttttataatggaatcccgatactggataatgccagcgactggtttcggtggaatcagaaggtcaatgagttcattcggatatctgccgttgccgacgatggggcgactccaccgatagaagaagaagaagcacggcaatggattcaccgccaaaagttctattctgcgatgatcacggcaaagctgacacacaatgcggcgcaaaggatcaatgcctttgagattcctcgagttcaagtactgcttaaggcagtcaaggacaacttcaaaccagaaggctccggcacgtatgttactctccaacagcgatacatggcccttacaagagacaagtgtgggagcactcaagccctcggagccgagatcaggaagatccatgctgaaaaactcctccttgaccctgattgtgtaacctccgaaattgagcgaacatttttctttgtgcatgcactcggtccggagtacgagagcttccgcgatcatatcttccgacaaatggaccttgtcaatgaaagggacgcaaacgggaatgttacgaaagcggcgcccacgttcgactatatcgagaataaagcaattgaggaagaacataggaagggacagttgggcaaacaaacaacggagacgcaagcacttcctgctcttgccctggtccgtgggccaggtgacaagaagctcatcccgtcgtcggacggaactacttgtcgaatcgagatcgataacgtcccatattgctccttctgccgaaaaccttatcacgttgactccgaatgtttcaccaagaatccgaaactgaaacagaaagacggagatggaccgaagccaaagacaggcagaatacacacaggcgcacgcaaacagtcgaagaggcgaccttcgacggatgacgaggatgacgatgcgggtggcccaaaggatccgaagaaaccaactttcatggcgacgaaagtatccgagaaagatgtcaacgaagcatttggaaacgatatcgagggcaatttcgccatgctcgaccatattcccataatgatggcgataaagaccctctctacccgcgacgcgtggatcatggatagcggatgcgctcagcacgtctgcaatagtgcctcgaagtttgtccaaatggccaagtatcatggcccctcactaagaggcgttgacacctcaacggctccctcgggagtgggaacagtgaatatcctgtgcaatgtacgcggcagaaagaaatggcttgtgcttgataacgtcctctatgttccatctgcacacgccaatctcatatcggtgctccagcttctcaaacgaggggcaaaagtcgaattctcaagccgggatgctatccttcgcaacaagtcaaatggaaagaacctgtttactgccagcgaatatcatggagtctacgcacttgatctgtgggcaagtctgactttcccctcttaccatgttagcccgcaaatgtctctgtggcataatcggcttgctcatatgagtgatgcgaatcttcggcggatcaaaaagcaggctcacggtgttcgggacatggagccacttcatccatgtaattcgtgcctgcaggggcgaatgatcgaaaaaccccaccgcagatcaggaagtagcaggagaggagaatacgcaatggagctcctccatattgacgtcgcagggccatttgacgagggccttgacggcagtcgttactggctcaccatcgttgacgacttcacgagctagatcgagattatccctataccacgaagacaagagttcgtcatagaatcactgcggttcttcctcgaccacaacgagcgccccgagcgaaaatgcaagcgaatacgtctcgaccggatatctgaacaaatgggagacgagatgaagttcatgttgttctcgcgcgcaattcaagctgaggtgacaggcgtggatcaacatcagcagaatggggttgccgaaagagcccgtaagactatctatgaccgcattggacctactctagcacatgcaaggttgccgtctaagttctggccggaaattgctcgaaccgcagcgttcctctcaaatcggtcgccgtcatcgaaactcaacatgactccgtaccaagcgtggtacggcgacagacctgacctctcaagacttagagtgatcggatcaaagggggaatacttgatcccgccaaagcagagaaagaagctcacggatccgcgaacaagaccatgcattttgctgggttatgagggaaatacctactaccgtatcctactgggagacggaagaatcgttggaactccaaacgctgaatttcaagaagtccttacaactccctccacacagactatggaagatgtgggagccagacaagacggcttacttgaggcaacggctgctgccgcaggagggagtgagacggtgggactaataaaccaaccgtcggtaggtatacggcaagcatccgtgcctgcttcggggtaccaattgtcgatggatcccccagagcggcccctacctaagccgagaaacgatatctcgcacacactgcctcggagtgacgagaactcgcgagtgcttacccagccgagtgacgataactcgcaaactcaagcgtcggcccaatcgagtgacgatgactcgcagccagctgttgctgtacagggagacaggaccttgtcgtccacacggagtgacgataccctcggacctctatcacctgcctatcaggattctgtccttgggactgacttaccgtccggtggcgaccagcaacagggcgacgcggttgctgcacagggagacataaccttatcgtccacacggagagggaacaccctcgggccactatcacctgattatcaggattctgtccttgggattgattcaccatccggtggcgaccagcaacaccaacgagggccaatcttagaatggcaacgatattcagagctccatcggccagtccatgaagttcaacaaggaacattagattaccaccctgaactaaaacttcgggcttcggaagccacattggacaatcctgatggggacgaagagcttgcgctcatgaacgtacctgaagagaacgtcattccaaccttcttggccatggctgcaaaggagacggaaccattcgaacccaaaagtctgagccaagcaaaaaaaaaaaaacgacgcaagctggatggattgggaaagagccatgcttgaggaagtgaattcactccaccaaaatcaaacgtgggagcttgtggatcctcccaaagatcggcggttgctcagcggtaaatgggtcttcaaactcaagcgcgggccgcatggcgaaatcatccgccacaaaagccgatgggtagtgagaggattcacacaagaagaagggattgactatgaagaaactttcgcatcggttgtcaagccaatgagctacaaggctctcttcgccatcggagcggccctggatttggagattgaacaaatggatgtcaaaaccgcattcttgtacggaaatatcgaccacgagatctacgtcgaacagccccaccatatgacggacggcacgccaagggtctgcaagcttcgaaaggccctctatggcttgaagcaggcccctcggatctggtaccagactctgacaaacttccttcgcagccttggcttcgagccaatcaccgccgatctcggtatcttcgtccggagcagtgtgtacatcgcaatatacgttgatgatctcctgatcgtgggtccgagcatcgctgagatcaagaggatcaagcggagcctgagaaaccggtttcagatgacggacctgggcccatgcagctactatctcggggtgtccatccagcgagaccgtcaaaacaggagactgctcctaagccaagaggcatacattgacaatatcgctcatcaatttggaattgacaactgcgctcccgtcagtacgccgatcgaaacctcaccacttccggaaaatagtccagactacacctgctctccagatcaaaggacctcttaccaacgcattgtcggatcactgatgtatatcatgcttggaaccaggggggacatcgcgtatgcggtctctgtcgctagcagatctctctcaaaccctgggccccagcacatgaaactggcccgtcgcatcctgcggtacctcaaaggaacaaagaacctcagactcacctaccaaggtcagcttcagacactgagaggcttcacagatgcggattggggagggtgtcgcgccacgagacgatccacagcgggctatctcttcaaaattggaagcggggcaatcagttggcaatcgaaacgccagggcgttgttgccctttcaacctgcgaagccgagtttctagggcaaacgcaagccaccaaagaagcagtctggctgagaagacttctcaatgaattgaatatggatcaaggaacaaccgccacgatcatctgcggtgataaccaaggtgccatcgcacttgcttcaaatccacaataccactcccgcacaaaacatatggaaatccaacgcaagtggcagggagaggtccaagacaacggaacagtgaagctcaaatatatcccaaccacagaacaaattgctgatgggttcaccaaaccccttgctcgggaaagatttgagtggtttcggaaagggcttggcatcgagtgattgctacaccttatttatattgaacaagactaaggcgcagggcaccctttccttcctttcttcacaaatgaagttttttgaaggttttaatgggacctgtcgcaaccgcgagcatatggtcgctgacaccattgggaatgggttgtcatcgagtgggagtgttgagtatcgcggtggtcaaagcttatggcgggactagcgatggacatttaaatagatggggctcccacttttgatagtaacctcaacaagaacattacaactacctatctcaacaatccatattcgcggagtgcgaatatgaatatgtcgtttattcgcattcctttattcctttcggagccctagctatcccagcttcagaggtatcagttgagagattatttagtgcagggagagatcttttaaaagttcgaaggtttgctttacaagcagatactatgaggatgttgacgttgatgaaggacattatttagttgattggttgaatttattgattgattggttatattaagaaggagagtaattaaaatttttaaatttgttaaactattcgagggaatactgtacatgcatggatgatatatataatggcatgtcgtagttattactactagtggttggtgaaataactgactcctgtcagaacagataataccatattacaggcgctcttaagcgtgtgcacgctttttggcctagtcgcgtattttgctgtattgcacccccatctcgcgacaactcctgactagtcaggtgactatatactaagcttaattagggtagttcgccggtctaccgatattatcggcgaaaattcatacgatatttggtaaattatcggctgctgccaatagcttcagttattatcgtttatctgtatcggctcataaaattggcgcccgataattaacggccgataataacggccagataatatcggtaaaaaccgatatcgggaacagccctaggttggggtagtttgctccattgaagtccgtcttgggtgacgtatactgggagagcgagtaaggggatgggaaccaggcatcgtcttcagcttggtctcgtacgggagcgcggtcagatgagctagacatggtaactgtgaagttcttctgaatgaataggagaagtaatgagatgatcttctttatcgaagtttggtaacaaaaccactcgagttcattgatacagggcaagggcaagactaagccttatcatcgaattgctgcctgaatgcggtctctgtccttgcccgtgatgatgtcagtgatatagtctatgacccgcacaacttgtgagaatcaattttatcagcccagaattgggaatgatctatacaccgaagtccatttaatggtatacacgggttctattattgaattcggaacgattgcaactcccctattgttcttgagacttacgaagtgcggtgttctcatgccgataaaccttgttgagcggggttcctcacgtccaaaagagaaaatatgacttcgcactcgtaatttcgaatacggcagcctctcaatgcagcaaaaggtaacgttccagactgcaaagcccaagtccgatggcaaagtccgacggacgaggtattttgcctaacggtatttgaacctactgaaaatccatctgcaggactagtgagtcggcctattctgccaccgccagtcaaacgggcgtcgccgtatatctgtctcgcccagctaccccgcttctacacttcatcccaacgccatccggcagcctatcttgactcttatgatatcatatagtactgaaacactattgccactatgatcagtgtagaaacaaatttttatctttctattgaggtatgagttggtaagatttctctatacaccctaaatctgttcgggcgtagtagagtgggctgttcccatagtaaaaaagtcttggcaaagggggggaaacaaggtcaaactcgataacctcccctctctccctctctccttaggtatattaaatcttgtacttttcaatcgggctggatctttccgtcgaataattatttatttgttaagtgttggatcccctgtactgatggtattgtcctgttaccctaatacgcactatttcctagaatttccaagttttgagtgcaatatcaatcaatattcaaaagcaggactagaataagtgtaaagaatagtatcatattttggattttgaatgccaagaccaaaattttatgcaaaactgggttcaaactgggtctaaactgggttttctgggggcctagtcactggttcggggttgggctctaggtcgtgatttaggacctaatttgggttttgcggaagcctaattgggataatagattcataccttctcgtgatatccggtgttaatccctattggggagaccaaagtgaacccaccgtggttgtacggtctggtccactacagcgcacgaccgtacaacggaaggactataagtagatcgcgtaacataagggctttggaagtatctaggggtaggtgtatattgtgaatccagctcctatggctcgagctcttagggctgagagatgtcgtcaacgtgatataggctgtcactcatctacacacgatcgaagctgtagagacctgcgttagcttacgtgggcggttgaagctgtaaacggacggaacctatgagcgaatataaacggcagtagcgagtaggatccatggggtaacacaaatgagagccatattagcctacttagtctaccagagttagtcctctgcagcagcagtacagccttcgtcatgtaagaggtaaatgaagaaaagggctgcggaggaaatgaagaaaggcaaaacagtgggcagaatcaagctagatcgccagattctcctcccgcaccttcgagaaccccgcctagaacccggcgccagctcatgtgcgcgcgctgattggctgccccctggcataataatctcggtacagatgccaagcaccatcaaaggaacaaagtggtaaacaagaaagaagaaatgaagggaaaaaaaacaataatctacagcattggcccaaggtggacactcgacgaggtaggcctaatagtatgtggacaccgggagagtgtcatgccaagcatcttgggagagtcggggctttcttggtaaagaaggaaaaagacgaggaaggaaaaagacgaagaaggcgctccactcacaatgcactgtactgagccatcgtgaatggtgagatagggccaattcgagagtggctcccacgggccccctcctctccctctcgctctggctttcgtccctggggttttgctctccttttctccctcgtcctgaccttctctcccccaagcttgaagttttcccatccgaccagagggactcgtctctctaccacattcatttttagaaaacgtctgccacctctcgatttcgaacgatttcccactttgtgtctggccagggtgtccaatgaatcatatttctcgcattgtatgacttcacatcctcagaccattcattattacaaacagcttttgacatcgcattagcatcttcactttcttcgcaatgctcctcgaaatattgtcgctttggagatctcgccggcaaggccaaagctctcatacgcttcaggagaaacaggccccggtttctcaagataacaatggcgtcgagggtacagacactggaccccgggaggtcccagaagccacgccggcgaatgtagtctgagtcatagcagacggcttttggacttcgggccaatgatagcctttttcgagagtctactggaactgctgcgcacaaaagtagttcgttgcttttcgtcttaccttcgttattggttattgttggacttcaatttgctttgtatctatcttttagatttatctccaatcgggagcgttaataattaatatatctttgactgcactaaagcttagcctcacaaagatttgccgcttggacggttgactatggactgctatgtacgtttgtttggcaattgttacgccaaccatacaaggaggtacagtggcgtaacattaatatttgacctcaggtacatcggcccctaggcccacttttatttactgcccagcagaaacctaatgaaattaatccaattcaattcaactagtagctagtatgccaccctccatatttaataacatcagctacccggtgaggcatagtctccgataaatgcgcaaaaatatcaatatctaagccctcccaaacctcctgagcggcatccaataaaagatccaatgtagcttcgtgattagagagatacttcaattcagggtgacgtttcaatagctcagcctttagtagtgcctataggttctcaatagggtttaagtcaggtgaataaggaggccattccattacctcaaagcctagctcgttcaatgtgtcccagacaagataagcagtatgcactggcgcattatcgtgttggaaaatagcatagtgaacattatgaaccaacgttggtaatacacgacgatagagttcatcaattgtccgtgatgagacaccacatcgaggagcttctgggtctccatctaatggaatcaaccctgaacgacgaggttgaccacagaatgcagcccaaaacattcgtttaacttgcttccctcgcgatggaaccatttgaacttgagggccttcgactggatggtgattaagttggtctttggacgagtgaatgtccattcctggcgtgcaccaataccacgttcacttgtacattcgtcggaaaaatagacacaagcccagcctgaaggctcaagatgttgccatcttcgagcccaacaaaggcattgctcggcatggattggctttaaagctggccgacgcatttttttccatttgcgaagacccatctggtggtgaagacgccaaattgactgacgacgaaccttaaaatcgacttccgtaagtagtttctcggtcgaaattgacggtgtttcttggataataccatatatattatctctatcatcctcagtaaactttcgaggttgacctaggcgtgggagactctcttgttttggcgttttgactcctgggtaagagtatattgtatagtagagcgtggaatatcatgaaagcgcatctttttgatagtagttgcgccccaaccattggtatgatgtagctcgcatatcttagccctagttaggcaatcgagttctgggcctcttttacgtggagtgcgtataggaggcatagtatagggtgggtagtaagatattaaatattgtataaacatcgcgtaaaatgtaagacgcgtacaaccaagaaggtaggcggtcacaagaggcggtcaaaccccctatgtacccgagatcaaatattaatgttacgccactgtatagaatatgcggaggaggcgcctatgcatcaccggagccgcctgttgatacatcacctcctcttcagcttgcatacgcacagaggcatcccctttataaggaaaagctggcccctcttaggaggaccagcgattagtctgatttctgaatatcatcatactcatgtcaggcacatctcacattcttcactcgtatccttatcgtatcaggacacctccagggactgtcttaacaaagtggcgagcttggctcatctggaaattcatcccgcagtgttacagaatgagaagggagggcatccaagccatgctgtaaaccaaggtgtcagtaactagcaacgatctgcgacaaggacgtaacaagccttgtccagtaagcagtgcgtatgtctaagaggtcccccaaaaccttcatgttcccgtaatcttgcgccttttggacagtcttctaacttgtctagttgcttgcaattatgagtcagtatgaagagggccaccgccatctgagcctctagagccaagttatccagagatttgggaagcctaccttttcgttttctccttcgaccccaatgggtatagacatgtcgctcttacactgctgacataccggggagtcgccactgcacttcgttttgtgttgccgacaggattcgcaagcccgagacactcgccgaatgtatcgcggcgcaatgcttgaccgatggcggggaatggcaactttgccatccctagaaaccgccccctccgcccggctcgttccaagttgaagctgtcaaccaccgaggtagtctggagggaatcaaggctgggaggttcagacagcttattttgcatgccgttttgagacgctagagcctcgcctggtggtctagcagcccagatcaccctgggattaacagaaattctcatatgtgccacgaatatttcattgatcgtcatgatggcatgagacgccactacggagcgtcataatcctgatcccatgggtactgaagaacgtgtagaatgaccgagggccggcccgtggagtaccaaggtagtcccccttggtaagctcccatcaatgacatcatgatgtccgttgacctttacacgcgaagccaaggtacgagaaccgcgatattgttataatactgtactgtatcatagcgtctacttcctgccttcccaaggttccgaatatgacgaagtctttgacatcatgatagcatctccattgaatcatctttaccttcggctattaattacagtctataaattgtcttgtaagtgattacaggtaaatatttaaacagcaattaagtacctaggcactacatcaaattttcactttcatgttacccatcatacctccacgacttcgggaatatacagcatttagtcagcaacttgtaatctcaccatgtcgaaactctttggaccactcaacattgtgcacaaagatttaaagcaccgcatcgtcatggcaccccttacccggttccgtgcgagtgacgaccatattcaactccccatgacagttgaatactactctcagcgtgcttccgtcccgggaaccttgattatcacagaagccacaatcatctcaccaagccacggcggtgtccccaatgccccgggcatctggaacgacgctcaaattgaagcctggaagaaagtagtggatgccgtgcacgcgagagggtgcttcatcaactgccagctctgggcacccggtcgggcggctgataaagccacactcttgaaagaagctgggcatgggcttctgtcggccagtccagtctctttgacagattgtgcctgtcagccccaagccatgtcggaaagtcagatccaggacgccgtccaggattatgcgcaagcggcgcggaatgcgatgaaagcggggtttgatggggttgagatccacggggctaatggctatttgctagaccagtttttgcagaatacctctaaccagagggaggatgcttatggtggaagcgtggagaatcgcgcacggtttcccttagctgttgccgagggggtcgttcgggcgattgggccagataaaattgggtaccgtattagcccttggagctcgttccagggcatgcggatgggccatccaattcctcagttttcttatctggttgagaacctgaagactctgaagttggggtatctccatgtcattgaatcgagggtgcacaacaatgttgatgtcgaaaagacggagggaatcgagtttgcgttggatatctggggaaagacttctcctgtgttggttgctggcggatttacgccgaagtctgcgaagtatgcagtcgatcaagagtatccgaacaacgacatcggtgttgtctttggaagatcttttctcgcgaacccggatttgccatttcggattgagcatgatcttgacctcactaaatacgatcgatcgtcgttttatgccccaaagcaggctgaagggtacaccgattacccgttcagcaaagagtttttggtttctgtgtcaggataggcatgctattcaaggaatgaccgacgatgagactgggatagccgttcaatttgtgcagaatagaaaaagagggttcgactgtatatccttcaaatcagcgctatccaacccctagcagaccaatcagccacaatatcaagctcctcagtcaccaacacaatatgtcagaaatatggtgaatttgcatgcggatttctgggtattcacccagagtatcttacgacatcaatatcaggtacctctcataaaagtgtgtcggaacgtggtcgttacagtacgaactagtacgggcatagccaattgagtacttgagaatgtgattttgaaaataaggctataagagaatgccctgaaacggaggaacgtagtgaaagggtttacaaccgtgggcctgccctgaaacgaacgaagtgatgagaggagggggaaactaggcctcgccaaacgcgggttcggggcgggtttttggaaaatctgttggtttattaagtgatgcttcaatgctcatattattgaggggagttgattgtgtgttatgttgcatgtattgtgtaagatacaagtagactgagaagtcaagtatatgagtatgcatgtgatcccaacctcattattatccatgcaaccagggtatctcaacaaaatcttcttgcgtacccaaattacccgtttgtacccatggaaatgtgagagtcgggaagcacaccgcgttcctattggacgactaactccttatatacagctgactacgtcgggcgctaaacccaaaaggggagagggagaatcctaacacccctcgaaccgacacaggaagcaaaaggacagaagcaaaacatcccaaaccagaacacagccaattcgatatgtccattcagaagaccccaatctggcccccgaatctcttgaacgattcctcagccagtggcttcgtgaaaccgtcagctgccatatccctcgtgccgattggagtcgggttgatgatacccctggcagcaatgtcgcggacgtaatgatatcgaatatcaacgtgcttggaacgcctagaaacgaatgacgttcgaacaagatcatgggcacccttgttgtccatgtaaaatgtaatgggctcggcgtctgccgcatataaacccatgtcggccaccaacctagtgagccactcgacctctctcgcagcgtcggagaccgccatatactcggctttgttagagctcaaagccacagaagcctggaggtgtgatcgccaagataccgggccgccagctagaagcataacgtacccactacaagaacggcgtcccggtgtaaggggaccgccccagtctgcatcggtgtacagtactggtggaggcaacattccgctgcctggtctgaagactatcccaagttgtttggagcctttcagatatcgaagaaccctccgttgtgtggatagagtcttctgtgttggtacagtgttgaagtgggccaacaatgttggaactcttgcgatttcaggtcgcgtatgggatgcaagccactgcaatgaccccgttacgctctgatattgtctcttgtcaatactcaggtcatgcaaatcgtcaatgaccagacccggttcaatcggagtggcaacaggatagcaatccggcattcctgcatcgtccaaaagcttgtcaatgaagtcaggctgcgatagcttaatgcctgcttctgtctgttcaacgcgaagcccaaggtagtgctccatttggccaaggtccttaatagggaactgttttcccatttcggagaggatccattgtatctcggtgcggttggcaccgatgattccgaaatcgtcgacatgtgcagtgacatatagattcggtttcgtcttgtgaagaaatagccctgcatcgtaagggctgattcggaagccaattgcttccagtttctcccggagggtgtcgtaccaaatccgggctgcgggtataaggccatagagggcctgtttgagcttgcagacaagagtgcctctctcgccctgctcgaatccatacggttggcgcatgtaaactgaatttggtagcttcccattcaggaaagctgtgatagcatcagcttgagctatatgccatccataatgtgcggcggcagcgaataacaccaattttgttgatgccatgacaaaaggtgctgctgtttcgccccatagggattgatgtccgttggaaatatttccacggatcacccaccgcgctttatatcgcgtggtgccgtcgactgcctgcttcttcgcgaatccccacttgccagggataggacgtagcccaattgggacgtccccagtgcgattcaattcccacgtgttccgtttgtgcaggtcgtcaacttccttgcgacatgctgcgtcccaaaggacccgatcgacgctttccatagcttccttgaagcttcttggcacatccgctgccgactgagatgttttggtcatggctgcgaagactttgacttctttcgcaggtcgtacccaattatcatcggtgattgggtccgtaagctcctcggagctcgttgaatcaggcgtttgtttagtcacttgctcccccccttggaacggggtttgtctggctgcgcctgtcggccgaatgtctccagtgttgaagaggcggccagtctctggatcccacacggtgtagatcgaggcaccattgtatccgacaacgcgtcctattttccctcgaggttctagctttccggtcggttcgctcgtgccatggaggtggtaaaaaatgctcgaaccgaaaggaagcaggtaactcaaatcagcagggattttagagatcgcttcgatcgggatcctggtgtcctgtggctggatgctctcatcgatcgtcgttccaccaggtgtggggttattttagagaggagtgctcgtcggggatatattggcaaggaaaactgcagcgactagcgcgtgaaaccagaaggtcattgggagacctgatgctatccacatcgcgcgcgccttctctaataccactcgattggcccgttctgcggtaccattctgccacgcagaataagggttcgatggctcccactggcatccccactctgtcatcattgattgtaattctccggatccgaattcgttgtcagatcgcagaaaagcaggtgttttgaatccgagattgttgatgtgctgacgccaataccgcagacgtgcagcaatttcgcgtcggtctcgagagatcagactgtaaatccatcggaatcgcgtcgcatcgtccgtgatcaggagaaaatatttatagccatgccgggactgcagatttgccgcttgagaagcgtcatcatcatcagagaaaacgtccccgccacccacgatgtcaacgtggatgcgcatcaatggccgtgtggctctcgaggcctgccgacgactgtatcgtcgggttatgttcgcttggaggcatacctggcaaggcggttgggccttgtcgcctgtgattttcactccactgcctggacggttggcaaggtagagtacatctcggtaattgagatgtgcaagcgtgacatgccattcccaaagagtcgtagggaaagcagatttgatatcgatcgaggcttttgaaacatgctcatctccactagatggcttagccttaatgttgctctttgcattagagctgaaataagcgactagctgctgttcgccagctatcggaatgggttcatcagaggtcaatcgtgaattagcaggagttgctattataacgaaggcctgactagagacctcaaatggttcatcagcggtgaatgtgtaaacatcgcttgagtttcgaacggcaaagaatcgctggttcgatggatcctccaagacgtagtggaatggaggtgttgatctcttgtgaaataaatccctgatcatgcagaagcgcctctgacacaaggttggaatccgctccaggatatggcggacgtctttcagagtgacagttaggtcatttagcttcatattgactgttcctgttgagtatcgcggtggtcaaagcttatggcgggactagcgatggacatttaaatagatgggattcccacttttgatagtaaccttaacaagaacattacaactacctatctcaacagggtggacctgattcactgggtggagattcttcggcaacaagatacgatgcttagatatggattgactcgaggcttctcttgtgttaacttccaataaatgtgctgaattgacgtcatgaatttcattatttagacatgtgctttttattacttatgattcaaaagaaacaaattctaagctactatagttcaaaattcatcaaaagtagctgtcgggacataatatcccgttcttggtgtacgcgttcttgcgcggagctgcggctccggtgttgtgaccgccgagtgtccgtgcatgggattaaggggtagttatcttggaacctgacctgacttggaaacatacatacaacacatctatcttacatgaatcaattgacctttgctttggaagcataaccactgtccacttaactgtgtacacagtacctagctggtgataccaacagttactttaggcatcgccttaagcagtttggccgccactgaagggcaataaaatgcaactgatatcggaccgatccagccaaatattatttgtaggacccacgtataggatacctcgttttcctctgacatcagacaaaaagcaatactaaatgtagtattagaaggagatagaccaatcagatgaagagaggcatccgaaagcgattagtcttataggtacaatccataagaaaacccgattgtacttgcgggcgtactcaatcgatatcggatgggcaaagatcagttaagtcaaattaccgctttcgtcctgtttgctatcataaaaccaatgccggcttttaattggttctcaaggtattgtgccgacatcatatcccctacaatttcacgttcaaattgtttgtttaggttgtataggccccgagataagaaggtcgggatacccatttcggatgagatgaagagtgttccgggtgggggtaccgacgtcaagataagctttaacctttgctttgtgctcaattttttaatcgtttcgtctgggccctcggatggttaattagctcagcgtgatcgattgtatggttatgaacaagatgggaccgttgcacgtgccatttaccatgccatttatccgaatttgccttggccgagcgcatacaatatatccaaaaagggcaattatcgaccattggtcccttctttttgagtggttcgtagtcttccggcttatctttaaaccatctggtgtcgtatttaccaccgcgatcgcatttcatccgaaaattgcgcccggactggacgtgcgagtaacggcgacgtagccctgcgagatggcgtaatcacgtaatgcctcggcatttcctcctgggtgtcatacgattggtcaaatggggtagacattgcgtcgtagtgatgtaattattgtgcaattgtaagcgaaaattgagataaatatagggtacactcgcggggattattattattattattaattatttaacgtcgccggcaggtcacttggcaggtgacccgctacctcccgaggggtaactggacgtgctacctaagcgatgatttactacaactagctagctagctcaactaaatacacgctggaaagcagcaaatttgagcacaacgtgctgagaaaggaatcgaaggagcgccaggcactatcctggcctgggttcctgggggtggagtacccggtctgacacccggtctgactacccgcggatgggagagggtgccagcctctcccatctaggcagaggtgaagactgttgcgctatgcggcgcatgtttgtgcccgatttggacagatatccttaaagaaggacgtttcttgcacgaaacggccgaattcctcggccccagcagctgtgctcagtatccagtctatcattgcagatgggctggcctttggacctttccatcgatccttccagcgtttcctcgcaggcgggcagaagaagaagtggacgggggattttggcttaccgcaggagcaggtcgtaggggagtccctgtgatggaacctctcgtggtacacctggaagtcaccatggccagtccgcgcggctagtagccggccgagcaccccgcggggaagccggtgttcccgagcgcggctgttcttggtgtgaggttgaatatttaggtcttggtatgcctagtatacgcaatacgcgttgccgcgcgggtatgttgtttcacttcgcgcattaggtaagatagggaagggggaatatgggagccgtctaacgctgcgcccctctttgctagctcatcggcagtctcgttccctgctatcccggagtggcctggcatccagcgcacctccacgggcgtgcggggtgtgctgagaatatagggagcagacttccactggatggtgagctttttgaataatttcgtgagtttccttctgtgtggcgcaggtctcccgtccgcgagtaggctagcgacggcgaggttatcgagcaggataacgaggccggtggagtagcttgcgcagggtaggtcgacagccgcctggaggccctctactgcccccataagctcggcgtcgtacacctctgtctgggagccagctgacccatacccttgggtgatagggatagggccgtgttggaatatcccggtcgctgagataataaaaggctgggatcacgtgcatacattcacctacctcaagttgcacccccattgttccatcaaaaaaaaaattgcgtcgtcaatgcgaccgtacgctctagacctgtcgacctcccacttccagctttgctcccaggatcatttcattaatttgccccacaatgacccttcgtgcttgaacctctggtaggacgatggcgagtttgcgaatctactcgagaggtctgcaatattgtcctgtaacaaaacaaatcgagagatttcatgttcagtgcagcaacgagatggatcagttgatacttcctcttttcaacgagtgcacaaatgaaaaggccgttccgagcgtatactgtcaattctttttcgccatcgttgaatgaggttgattaaccaccacacgctcccaggagcctactagaataccatgtatgagcctcacaggcaattttctcagccaaccatgtactttgagctagagggggaactcagaactcccaagagcacccgcgcctacccgtctcataatcctgtctgaagtgataccagatatatattgactcacccctagtataagaattccaacatccttctgccgtctgtactaaagcagagtaaagctctgccttgagcatctcaccatgagttcgatcttcgcaccccttggcttccttggtccacactaactgatcgtacttagagagagtcagtcctacctttgcgacctcgaaccagtcggtatcataactttcaccacccgggtcacagagcgaagcatctccacccatcgggaagctccctagggcaccgaatatacatccggcgcttccaacttgacagggctgtaccatcttttgttgtccgtcatacatactgccctggagagatctgcatcaccatgaggtcagccagagcctagcaggctcaatagtggataacgacatcatcttcagcgagaattctggcgttgggtcctagacactgacgaaaagattacttcctacctgactgacggtattatgcgcaagttggacggtaatactcttgatccttttttcttcggtgatatggcagtgcgtttgttgccgcacctatgggaaagcaccagatacagtgagtctcgaaaccggtgcaccctccaacactcagagagattctttagacccaccgccaagatgacactagtctattcctagagtcttccgaagtacccctgtagtgaaggcggttgcaccggtttcgaaacgcactgtacaacgttggagaacctcgattcgtgcgtaatactgagctttttcgcacgcaagccccccccccccctcctcttctcctcgaataacgaccggctgactgattttattcaccagcaatgatctctgaccagaagacaaacgcagggttagctgtggagagtgagatcttgccaaaaatcgttgaaagtaaagaaaacgcaatatcaagtctgacatggaaagctcgcttttggaacaacatcatcacggcaagcttccaactgtgggctgaccgtttccctactctttggctcctgagatttatactgtacggaaaatatatatcagccagcattattaaattcctacgaaggttggcagtctttgctctatgacatattcccagtctttcttgcttcttctgcaaaaacctgctggacattttcaatcggcacaagtttatcttgtatcgcaagccaccgcatctgcagatttcttctaccaaattgggacgtgtacgccccatgcagctttggattcttccaaaaaatgaaagttccatatttgcagcgtgaagatgtttccaactctctccccagtccaaatcgctgatgccaatttcatctctctttagatttacattactgtataggataaaaatgcagcaagaaaagcgaggtctcaccagaatttcgagaccatctttcacagcaattcgaccgtcataatttcaggagtgtcctactcaactacagtcgaacgagagaaccctgcatgatattgtcaggcattggctctaagcgcaagcgtatactatgagttcgaagaccaagaagacgcatatctgtctatgtgcttgaaaaatcacattgctttggctagagaacggtcgcgaattcccagtatatggcatcggctatggcatctctcgatcccggaagcttacttgcgaccgaggtgaccatcattgccatgccaatgaggttctttgcaaagaccgggacgcgtttgattgagcaatgaacgcccttactcaatgcgaaatgtggtaatccaccgatagtcgaaatcagaatcgcctcaagtactttcctacttcactacaattcgatatcattttcgcgcttcgtcatggctgctttggcgcgtaagggatacacggcatcggtatctctctctgtaaggtaattaaaagtcgaaatcggctaacacagccaccgttttaatacaggcaagccacagtggactttattttttgatacataaaacaaagtcagttccgtaacataactgcatcatacaacggtattttgcctaggcccttgtcatttggtatgaactactcagatatatgcgaaatgaccattttctaaaagattgatggttcaagcctacgcaggcttagacgcgttttttttttttttttttttttttttcttaattgggctgtaatgattcttggccttaaaatgaaaaggcaacctgatgtgaatacaatttcattgacgtggtttcatatggaaggtatccaacaataatctccaaggtttttcatgcggactaacagggacaaagttgattgttgaagcctggatttggtgtttcctcaaatacttgagatcaatgacgatatttgctaacagtctgtcgatcagacagaatgacacaggtgctcctagttacattttcgattccacggctcgtttaaatcttatcattctctttgtagctaacatggacccgagtcattcgcaagagcacggcaatccgcgcggaacagtcagtatacgcccaagtgattactcatcaattctatgaagtactagcgaacgaatctacagcagagcagtgaagctaaggtctacctgaaggctgtctttgcaaatggagatattggctcatactctcatcccatggatgatgtccagacaaatgataagcgataaactcatgataggctcggtatgaggcaaagtgctagtctgtcaaggccaaaatcagtatggaggataatttttggatgttattgggacatctgcccttcgttcgaccgttcatcacttccccactcacgtccttatttattctaaaccgactgttcttaaccgactgtgcttgaccgtttgtgcttgaccgtttgtgcttgaccgtttgtgcttgaccgtttgtgcttgaccatttgtgcttgaccgtttgtgcttgaccgtttgtgcttgaccgtttgtgcttgaccgtttgttcttgattgtttgttctttatttttattcaccaacaattgctggctgtttaacaactatctgccgtcaaccgttcaatttttaggtttagttataaaggtgttatttgagaacatctatgtcagaaaatttgcttgaccgcaacctggccgagtcagtggtaaccgcagccccacaaagcaattcgcgataataaagttcgtgttaagcagctgtagcagtgcaacaaacaaacaaacaaacaattcattaacgcccggcggctgaaccgaaagggcaactatcgctgatctactgtacatgtccatctgtacatgctgtgtctcctgaaagcccatacacaaaaccttatcacatatgacattttcaaaaagccgtgtcgcagcgagtttctcgtgagttagtaagtgggtgagtagactggcttgaaggcgcttcttcaagtgttcaacatcctatcttcggcagttgaagcgcgtctaccgtttgtcacatggttttagggctagtaggtgggggggtattctaaccgcattcgttggctaggttaagtggcctcaagtcggccgtagcaatcgcaaatcgtattgaggctcgcactgcttccaaattcggtttccacttttgatcatcggagggtggcttccctcctaagaagaaggacgtattacttcggtgagtgtgggtgcattgcagcatttccttccggtgggcggtctacttccaacatcgaaatagaaatagaaattggtctacggtctctctcgcttgtccacatgtatattgacctgtctcgacggcattgattcgaaagagatatccattgagtcttgccaccgttgttaggctgcccctgtggcgtacgactgcgaaacctctataacgcctcggcgaagtccaatacggccttaaccgtcttcgccctcgagacggtgtctagattacctctcttaccttcggttgagccttctaatagactcgacacgctatttaacgcgtccctaaccctactccttaatattatctgtaaatctcgtagttttagatattctaataatatatagccgaccgtttcctacgcgccgtacttatagcgattgtcgtctcggaagctaaatttcttagcatatgtgaataactagttgtagcctatacgtagctaagtgagtaattatactcggttcctaggtaggttcccgtatagttttctagtatacctcgctggtagcacgctatctaccttctgtagatacgctcctttggtacttaagttctactcctactcctactaggcgtaaatcttactacggagaaagacgttctctcttattagtagcggccggaaaggataggttttacccggttatacagcttctttagcgagttgatccgcggcctcgttcccgacgattttatagtatcctagtatctattagagacggaggaaaatatactctgcttaaacctcggtagctacttagaggattatatagataattcgttaccctaatctatttcttacgttctagattacttataaagcggatctactattgtagaggattattactattatatatatatggtctccgacgcttacctattagtaagctaacttaaataccgtactgactatatagaagatacctataagttccgctatataaaccgactactgttctatcgaccctacttatacctattaggattctattaccttattattatcgtttagggcgacgatagcggctcctagatgacccttatgcccggaggtgtctgagtagacgattatatctgatgtatcctttacggacgctgccctatctctcgctatctctcgatctagtttaagcttaatctctataaaggcgtccttttactatagtagtagtgggcgtagattaattgtctctaattcgttaagccggtcgatatctatagtttttatcgcttccgctagaggaaagcgcgcgtacgaccctatattatttctacgattctaagtatgtgataatatactcctaatagggtagttacgcggtagagtatatagtcttgcgatagtatattacgcgcgatagcggagacgaagttacgtagggagtatataagcttctacctctaaggtcgcggttactaccgtcctaaacgccgataagattctaattagtacgtttctttaaactatatttaagtatcggatataaactttatctctaagcgggttatattagaccgtcgatatatagtctactataggtataatatatacctagtagagctatcatatctgcttagggtgtaagtatcgtagtctacttaaggcgattgctgttttagtagcgcgcttaataatctactagatatactccttctagtgaagtcgctagtcgaatactacccctagtaatttagctataggtaatagcttaacttcggtcctatcgaagatgattcgtccgtctctatactctctcttctttctaataaggtagataagctcggttttctctactataaagtaggatctagttctctatacctacttttcgatacgagggatatcctcggattatatcttagtcaaattttctagaactaagccctctattctctaatagaagtagtcgttaataaatactaatatacctctctaggagtcgataggctagtcgactaggtcggtattaaagaatataaataagataggggaaagtagtgatccttaagctagcctagcgtttactagcggagtagtcttagtacagaagtcgttaaacctaatattagtgtactggtagcttataaagcttaatatctattttctagctataagcgggatccgtcttacctatagcgacgtatttaggcttatcctattaactctattaaaggtatcttttaggtcgaaggcgattagggttactaccttatacttatactaggctttatcgatcgtactagatagtactagtagggcttacttagtagtcctacccggccgcccgccgaactagctattaggtagtaggctatacccttccgctatataggataactatcgggctattactacctctaggagcttactaagtatatttaaaagtgagattaggcggtaagtactaggggctaagtaatccggcttacctagtttccgtaagataatgattttcgcgctcctctactatcttaggtagtatcctagctctatatatactataaagatacttataataatagcctttagatgcttctaaagcttcttctagactagtatcggtaagttatcttccccgggtatagtattctctttagctacttttagtaatcgctcgatctctaatttagtaattgggtactactaaagttccgtctccgttatagtgggtaggctgatttctggtatatttatggcagggaagaacgtatctataaatgccctcgctttatctttattttaggtataatcctctgagcctatttgtagtgctgggatataaccctatatctctcagggctttatatatatcgcggccttctagagcttccctttactagctttatctaggaactacttctagtacaaggacttggctttctcgatggtccttgtccacacttgtcgtttctactgcatagcttcgaaggtagccgtggtataagcgtgctctcttcctaactcggcgcagtttgcctgctacctcctacgtagttggttgactttgacttattagatcttaagatctggcgtgaactatcgcttagagtatagcgtggggcatatatcgggtataaaccggttgactacctaggctatcgccgctataagggtttctactacccggtcgagtattagccgggtcttaatctatttctataggtttatctgtcagactacttcttcaccaattctcgcctagtccgcgcgctcgtatactttcttaggttttatacttagtttactctagggttataggctctattccgagtaggtagtacggtagtctgatctatagttcttataatataaatggtatttaacgagtaatcctaggttatttattactatctagtcgatagttaagttctatcctagattatttagagcctagtaagttgccgttccccgagggaggtaactagagagattataagtttagaagaaggtgattagatcgctagtatctttaataaatctaggtaggatataattaccgccctatatcggataatatcggttaaagtcgcctataataataatacttatagagcgttacttattctatacagcagctgtaatagtatttactattacggtaagcgccgggattactaatacgttatcggctataaagagcggtactagagatatatagacagaaaagaaaagagtttaagaatcggccgtctagatcttaatagctacaatatctaggtggttgtaaggaatttgacggtataaggaggtagagattcgtctattcacgtagataagactacgaaaccgaactacgttagtctgcgtggtaggacgataaagtcgctaggcgctatagttgatatatatatagtaggttataatcgatagctcttagattagaaggatatctaggtcttagctttagtagtcgttaataagtacttctattcttagtcctgattttataatatttaactgaaggatacataggttgctctctaatatcagttagggtaagaagtcgcgggggttagatatcgtcgatctccggtagcgtacttacccctatagtcgaggtagcgggccctaattcctagtaggcagcgctactgctcgtattaacctatatagtatccgtactgcggggtctccttacataaccatactaggtatctaaactattaataccggaaatatctctttttcttaatctcgtatcgctctacctaagggatatagtattaactaataacgaaaccactacggagtatatatttagctccttctatagagtcaaactagattcctagcgatacgaatttccctagggccttatctttcgattttatctaggctagttcttcgatatagaaactgtattctactaggtcgttcttatagataattttttccgctatctaggtagtacctttttctagattgaattccttagtaagggtacggtatactataataccgaaacggggtttgactagcttcgtattattacccaatttatatagctactaagtattattactagctacctaagctaactctacgttcttaaatcgaatgagatagccggttttagtagtaccaattcctactacttaggcgtcttatattatagcgtcgctctatagtatagaacggatatggttattaacagtattagtagggagatatcgcctaaacgcgtttctattgttattatcgttatctcttaggtctatagaggctctctaggtactaattcggacatagttttactctttctcaggtttctaatagtttagcgagggtatagtattatcgctagtagctacgactgctgcctaagtcctagtcgcggtaactgtaggggcgctttcaacctatactcgtaacgctttcactttcttataaagcttctcgttcttttcttataggatatattaattatatttaatctcctatagctcgttctaagtggattcgataaccgcggtttgatagcggataatatcttttagggtcccgataagtttctatacctctttggtagtaactcgacccgagttctccgatagtataaatatatcgccgctctgcgttcgcttatagctttcggtaggcgatccaggggatccgatatttactctaggctagaaatcttctaccgagaagctagtaggagtttcttaggtatttataggagggggttcgggccctcccgtaggtaggtctatcgtcggtccagggttagttcccactcggcacacaaccatagctgaatatatatatcgaaggtagtatcaaccactctaaaagatctcgaacctttttctcttggtacagtagaaaccgaaaacctgaagggtatctgttttgggcagatacagacgcgctcgaaatcagtttcaccatttgactctgtttgattctttcctgaactcaatcctgaaacacgctagtctctgttttaatttaaccaatttcaaaatcctgaatcgtactgtaacccaaaatcacatgatcagctacgttataattaggcctcgccaaacgcgggttcggggcgggttttcatttttccaacccgcccacgggtaacctatcgcgggttttgtatttcacaaacccgcccgtgggtttttggaaaatcttcgtgggtacccaaattacccgtttatacctatcaaaatatataactgatacataggtaacccatcgcgggttttatattttataaacccgcctatgggtttttagaaaatcttcgtaggtacccaaattacccgtttatacctatcaaaatatataactgatatataatatataattagtcagtctatatatttttggtaatttattttggtaccgatttaatataagaaatataatctaataagataaaatatctacccctaaatatatatattaataatagataatagctatactatattttaggccgattgtctactaccctatattttcggatactataaccggataccttaaatttaagtaggtcctagttatataagtatcttctatattagaattgttacccaatcgagataagaaagctagttagataataataaatatatacttaaggtcgtttatagtcgcgcgggttttagatacctataggttaatacaacctataaaatacgttagaaaaaaaaataataaaagagtcttaatctaaggtaatagtatctctaactatataatactacgttagatttaaaggctaagcctcggttacgttgagatttttagaaaaatatcgtcgctattaactaatcgatctttaagtcccttacccttaattaaaccgtcctccgattccttcttagactctgatttccaatcctcagtataaatattaagattatatatacttaaatcttacccccctattcccgacgcgagcgaatatactaagtagctatatagccttttagggaaccccgatagagtagtatatttaattaataacccctgctgattctaaaacgcattagaccgaaccgtagaaagaactagatcctatataaattagagaactcgattgactttctaatatagtaggctaaaacggaatacaggtaagtactaaataacgaaggccgatctagaattaagtagtggatagatttatattataccgaagtttagggatacttcgactaagttatagatatcttaactagccgacctaaggtaatctataggtcttatttaactttattagatcacctataatataagaaatataggataagcgctataggaaaatattagagatctaaggcttatcgatagggctagaaaagatcctaccgttagatacttataataaactctatctagaaggccttcttaggagctttatctaattataagaaatttactaccttatagctcgaagaaaggttactaaagataatagcctatttacgattgcctttttagactattaagaatcccgagttcctagtactacttaatttaatttactccggcctaggagaattagaaatctctttagtaaagactctataacgttacttatataactctattatagtctaataggagtcttagttacgtgacttacccgaagatataaaagtttcccttatactagattgttagattagccctttttaataagcgtttatagcgattatagtatactttatcgataaagattagaactatcgtaaaatacttcttaggtttaagcctctatacagagcttatagtagcattaatctaaacgaagtacttctttaattacttaaggatagataacttctagatcgtatctttagtataactatagataatataataaataacgagactcttatctaagccttataggagttacttttattaggcggcgctattagtacgagagaatctattatacgtatactatatatagcttatataatttagctttacctaaagtaactgctaggttatattaaagccactctaaagaataaagaagtaagaaggttttagtctaatacttaagctatctatctaagagattctttagagtatagtaatatagcgtatactctcgtaaaggtatatttaacctagaaaaaaaagactataggaacttttattaatatttttcttttaatagattcggttatttactgtctttataaatataagcttataataaagagacacctttttatatctttaatcgggtaggactcggcttttcctcttctataatatatagacccactagaactctacttttttaatactttaaagagcgcgctggcttaggaatactattaataaatactaccgagactataaatatagctaatttaaagttatagatactaagtagtagtaaattgactatatagttaatctaataaggccgttctttaaatttactatagctctaataaagactaaagatataactatctatagtatctttcttatatataagaagcttctagaatatatcgaacgcttaaaccggaagctaagaaagaaaataataccctagaaaaaagatatatacggtactatacttatagtaaagtaaaagttaaaagattattacgagaagacttattataactatagatttctctatagtatagtggctttacttactccttagtataagctttattatatagtattaataaagaaacctagagatactattctatactatatagcgccctttattataagccttagagttagaacggcttcttaaactattatatatagtagaaataagcgaaggagtcaggtataacgaggttaatcgttatctctacaagtataagtatacctagcttacttaatctaaaagaccgctaataatcttagcgactaccttaatactaccgcgtatatattaaagagagaataagagtaaattccctatactttcgcgactagctcgtgatttactctcagttctagctactagtataggagttaaaaggctatttaatagtacctaggatatttactattatcgccaaggatctctaaataaaactataatataagacttgataatatatatatactctaagaaatttaccctagagagctagtaatcgaatctattagattataggacggcggaaggggaggattaggaaaatctcgaagaatataaggtaaataaggagaataaagacgaagatatagctattagtaatatagacgagagcgaattagccgaagatacctatataagtcctactacttagagtactctaggatttgaaagtattaccttataggaacttctgtctcttaatcgaccgtaagatacaacgataaccgctattcgtctagacctagagagcgacgataaagatctattactacctctagttatatatctagaagagagatcttaaaaaagattattaggaaggataatagtacctttaagccggcttaaaggctataagctatattagtttatctgctatagagctataatttgatataatctccttataaaaacacttatcctaaactataaacttttaaaactaggctatgattctactatagttaaggcttttctgaaaagcggtagtagcatatagtctactcataccggggcaatatattgatctaaacaaataattttacataattttgtgctagctaacaaatccttctcttttgggagtcataggtaatttgggtacccgtatgggtcgcgggtcgggttttcaaaaaacaaacccgcccacgggtctgctgactaagacccgccccgacccgtggggcgggttttcgtgggcgggttcgggttttggggcgggtttggcgaggtctagtaattacataaagacaaacagtacgagcagtataacaaatgtaatgtggatccagaggttattagctccagcagatcaggtgcggcgcaggattgccattcccatttcattaggtagcggtatcgagatgtagtttcagccttcaaagcccagttgctagtattgataccttatcaatgagaccctttaaaaaaattattgcaagctttatttatgttaggatggtagtaaacaagaacgacattagcttaaaaaatttctttgaaaaagcgttgcgacggccatgggcggtcaggccttctttcatcggtcaaagtggatcgacttatcacttcaccatctacaactgcgaatgataatcaagttcattggcatctacggcatcaaaattggcgaaaagaaagcctgtcatgacgcttcatgaaattcaagcagaattgggattccaagtcgagctacccaacgatgagagttaaaagaaacggttatatgcggatctctcacctgtcccaacaaatgttacggaaagggtcgagaaaaagctacaagaacaccaaagacagagcctcttaaaatgccatattggccctgaaagtctgctttcagggttaggcgaggttcatgtatgtatgtttctttcgcccactctatttctaactcaacccggcttttggctaactagagtatagtcacttaataccgaggaagctatcattgcaatgcagcgttctagtgctacaggatattatgttttcttattggacgttcggttctcatttggattggaactatgtctccctttgacgggtctcgaggacattcgcgttatgataaatgcaaaggtatataggacttatcctgaattgaagaatttaacagctcaaggaaatacagcatcaaagaaaccccatcaatatgacttgcggcaactggggggcacaacttccgcacgaactacgattatatatttttcaactcgccattgaagaccaggagtgagaacaaacagatccacctcatctcctggaaaggctttttgcagactttattggaaatccaagtggatttggctttccgtcaagtcagaatactagcgctctgtgcgtcaacaagtggatgcgtcaggaggcactaccctttgcataccggtcattccgtttcagattcgacggtatggatggtttcatcagatttgcactttctatcggtcgaatagggcgcgaaaatgtggaatcgttggatttgtcttggctcagctatagcgagatggaagccacgtcgaaaccctaccgatttctatatgcatttgccgtctcttcacgcttgaagatgcgtatatctattgaagcagctgaaaagactcagaatcttatgtttttatttcaatgaagacattctttccatgaccccgtgcgatgaatttaaaatcgaccctggcatccgagagccttcttccatctcgggtctgagatctgtcgagatcaagggattgggcgatcagcctctagagtccacctctgtctctgccaagtggttgaaaccacggttggaggatcaaactcgagctaccagctaagatagactgctgaatcaatatatctgtcacaacgaaaaaaaacgcctgttatttaccactcggccaaaaaggtgcacactttcttagctaaggtaagtatggtgtattttatgcgtattcttgacttgacaatatcctgatgcctcaggcatcattcaatagtcgtcacatgatttagcatcatttcgagccacatgcggaaattgcgagtttccctatctcctgtttcgctgcagcatgtctcaacgcctaaattcagtcgataatggggtcccctttgatggtaccccgaccgcggattccaatatcaaccttgatgcctcgatcaattagtggaataacgtccctcccacctctagtgctatgctagctatgctaggcaagttcccgtggtacacacgaatcgagctgcgaggatccaaaaacttcttatccaaaatccgacgatcctttaccccccttcccgataagcgaaaatttggcctgggtgtctattgcggcgcaggcgtcggtcgcgtgacgaaaggcttcctcggcgatgtctgtgaaatggtggatatcgtcgagcccgtagaaagttcacacagggtctcaaggaaggagagttgggacagcggggtgtgattggagacgtataaaacgtcggtcttcaggattggaatccgcataagaaatacgatttgatttggacccagtggtgtgtgggacatcttacagatgcacagctggtcgcctacgtcccaatatgtcgtgaatttttgactggctctggaataatggttgtgaaggaaaccatctccactgatccactcggaaatgacatgtatgacgaggtagacagcagtcacaaggatggattcgaagttcaaaattatcttcattgccgctggtatgaaaggggtcaagtctgagatgcaaagtgagtttccgaagcaatatgaactcttgccggtccaaatgtatgccttgcggccgaagaaatgaactggatctcgagaatctacgtcacggcttcaggccgcgactcttaagcactctacttagaaacggacatttctttcgcaatgattaaaacatcccgcggtggtcgcatcggagacataatgcccttcggatcaacaaatctgcaaacaatgcctctggcccacgccgaaacagctggtctcgtctcaagcagcatgtcgcgcagtttgttccagatgctttcgcggctccattccacattaacaactgcgctccacgatcaaactgctggcgaaatgaccagacaaagaaagtacccttggccgtcgagcgtcatcgaacattaaggtcccgacctttgttcctcgatcgggctgctctgtaaagggaccatcaggaagagacgaatgcctctcgacaccgatatcacgaaacgagtgcactcatcgtgttcaaaggcagatgacggtctttatatgtttggaaattgacaatgaatttgctggcctttgtggggtaattgagacacgagtggggttgtcatgttggctttattaaatcatccaaccataatgggtggctttgacacgcatgggaatatgtggtaattctttgcttgtgattctcaaaattccaacaatgtttcgacgatcgtcgtagttgcgattcagacaattccacgtgggaaaccttacaaaagctcacgatgatgttcttgattctacactgtagtattgctgtaaatgcttcggcgttcaagcgtttcttacaaggatggtgcattcccaggacgaaagaaccaagatgagccggcctttacgatgattgggtatcctataaataactactgcatgctgaagcggtctgtcattaccactacgacgtatgcctggtgagtatgcagatccaccgtaactttaccataagtgatgattttgtgccctggaaagacaaaagaaatgcaagtgacatcaagatcaaagccgaggctgtcaaatgatcgctcgataaatagagtagaacgtgacagcattcaccggtggctatgacgtggtcgaatcggacttcagtatgaaaaccacttgttgtatgccaagggacgcgtcaactattcggcatacaaatccattcgatgctctgagccacccacgcgcaatgctgtaagctagacgtgaacgaaagccaatggtttgcgaggcgtggttaaaccagattaggtacctgtgtggctacccaatctagacagataagcaagtttgattgggagtgacaggatgagcttctcaccgtcactttgtgtttccttcgcctaaagattgcccctggactcgcgaaggactgacaggggagggtgtctctcgcctgacatgagccctatattcctgatgtcggatcataaagttgcacttctcgcctccccatttagccctcatttgagaaaaacttggccatggactcatggtcactgggtggctctgagcctggagcctatgtgagtcatcttcagaatacatctattgacctccctcccgagccgggagatgcgcccgcgagatatccgccgacccgtgaaatttctgcgatatccgaggcctccagctcatacatcactggtgaagatcaacagctagaaccatctaccgcagagtctgcatatctcgagacatccggaatttcgtcttctgctcttgaggaagttatcgttgcaaatgagtctctatagagtactatttgcgacgagttcttgatcggcgaaggcgggatgaatggtggtgactctagcacgaatctggctagtaattctggcgcagtgaacaataccaacaatgatgagcccgcgactcatgatgcggagacgaagggcggctgggaatctgaagaagcagagatgccttcagaggaagtcatcgctccttcgccacatgatggtctgtactactgccaatatgtgatatgtcaacaacggaagggctatgccctcaaatgtcaactgacgtaggtttcacgtctgatttcagttttcagcatcgcccagctgctaatgaatctcaggaaacacattcggacgcatgttctacctgtcaaatgttccgaatgcccatacgcagcagctgaaaagaaagacgttgatcgacatgttaaagctgctcacagaagactggctgagcaaacttgggggcccatggagccaattctatgcgccttgtgcaagaaggaattcacacggagagacaacgcccagaaacactacaaaacaaaacatgttcgataaatgaagcaggaaggatttattgacaggatccagagtaatgtattcatttttgtttttgcacaatggcatgctttatttcgagtccctgctttaggaagactcgcagttaccaactttgatctatcccatgggggaggaggattcgggttggaatccattggggttttgccgttacgtatgggtgaaaagaagtgtccacccccgaacccattgtatctgacatgccgggtgtatttagcatttgatgtcagacgatattttgacattcaaaaaaccgtgcttccagtggtaagttctgtatagcttcgatttaaagtcaatttgacaagtattggtagagttttgtgcggtttaaagtcgcgaattgcttcggcttgggcccaggtagatatgcgaccgctggcaaccacccacaacatcaacattggtgttgagaaattgaccagtcaaacttcaaattgaggatacggactgatgtgagactcacgggaaattggaagtcctagctattgctcaattcaattttggaaaatttagaccgttttacacacccggattgatatgttttatggcatctgtcacacacattaatgcccatatgtacagaaaacatggaacaaaactttcaccaagcccgcagagcacgcccattcttattcgcaaaagttgtcagattggcgtcagccccagtgaaatcagccgacatgcatgaagcataccttaaagctccaataggcgatagcagacaatacaacataccatttgacggagggacggagtgcaacagtgtgaaagttgggaagtctcagaaaggttggttaaaatcacccctggattatcttccacaacgatgacatttaatgttatagggatacgggtctagtgacgtaggtgtaaatgcaaatgtacgcaagggccagtaaccaactgcacatgagccaattggtaagggaaggcaatttggacaaatggatagtcttgttgagctgctaatagctggaaaagcagtttcaaagtgagcgtgatagtgatatgcagaggcacagaaatggggaccatgtggtccatcgaagagactgtgcgtgcagccagagtcatcattccgaaaatagcacggactgagtgtcatgacttggtccaccactacgtataagccttccgagcagcatttgatagcctggggcaaattatcttttcaagcactcggggtgctttgctgacagcacagccttgtttttattcaacagaaccattcgatgcaaaccaacaaagcattcagccaacgggaaatatggccgcaactaggaggtctccgagacaatggcctcagcaccgcattcagcatcaaacatactggatgatgcttctgtataaccgcaagaatgactttcgtactgcctctctatggtgcagggttatccaaatggtgatcggcgtgagagatcgttcgccgaaaagattataatcactttttgtctagttcgtgtaaaatggattggctggcgtgccaaagatagtaggagcatatgcttggtgtacatctggggatgcacgaagaaggtatgttgtatctcaatcgtatctatgtgaattgatattagtaactgccctagtcgactccgtagcgataggtcactgtggtgattttatgatccttgaggccaggcggaaaaccaatgaatgccccaaatttggtcccaatcataccaaggctgtgcgacctggaaagcaacgtcaagttgcacctagcctttgcaaactagttgtcgtgggtcgacattatggcagctcctccagaactcgatcttagtcccaggggacttggaattggcgtgggggatccagcatctcaagccaccgtcgtaacataaaatgactcatgacaaagattctatccaggcttaatgaaagaagtgggaatgaactagtagtggtcttgtccaacaagaatgatcaatgaagagcaaacgatggtccgccaaatttgcaatccatgatccgaaacttgagcaacgttgcttccggtttctcctgcatcgtgggcctcctgcatcgtgggcctcctgcatcgtgggcctcctgcatcgtgggcctcctgcaccttgaaccaccttagttatctctgcattaagaccaatcgggatcaatctccaccagcaatttatgagttatccacccacgcgtgctgagggtgtttagaaagatggaccgatggggacctagccgacagctcatcacttaagcttatatagagctgctttacttagcggcggctggcgcgctgacaatgccccaagtgggagcgataaagtttacgataaaaagaaaaaaaaaagcaaactttgaaccgtattttttgagatacatcacctctatttaatccctatctccattgctccatgcatgggtcgtagtccatgtaattaaacgtgttgggttgaacctagagtatgaaggcaggctacgggtttacaggacctacaagattgtgattggtagctgccaatattggaggggtcgagtgaggtaaaagtcctttgtgaaactaatgagactacctgtcatgtagtggtgatttgctagctctgcgtgcgagcagattcgcaaaattggcctgctatagtcctggcaaatcgcattccgccatggcagcttaccattggtgatgggagtgtgtgggcagcggtcaaaaattcccctcatctgcttcatatgtctattcctgcgctcattcgtgtatttgttgattcttgctgcagatagcctgaaatagaatgatacaaacctctaaagcagataggtctgcatgagaactgtgtccgtgctttgtcttgagaccagggaggcacctcttgactctgaagtgcttccacaccttttgtttctatatatctctggcttcgatcttgaaaccttctattttgatcctagtgtcatccgaaccttatcttttgtcatgtctgtaaacattcgatcggagcgactggccaagtattttggagcggttattcacggaaagcaagaaatccaggattcgacccatttcaagcgatttattgaagcaacccttgatcagagtgatcctagcattgttgttcagcgaatcatctcaagccaaagcgctctgaaagccttgcaaattggactgaggtccaatctcaccccggtcttcatcaacgggtataccgcgaagttgattcaatacttgaagaatcgcgaagtcaagctactttgtaacggccaatttctcgagcagctccttctgctcatcgtggagcctcggactctctggggcgcatttttggaggctttccgcactcggaaactggaagatcatgcgatccaggctctgtgctggttgatggcagagttgctttcattgcctccgtcttgcggggtggatgttagcgccgacgctcagactgttttgaacgatggatcgcttttctcttcgccctcggttgacatacgaaactcgggccacaaaatcaaataccgcctagagatgaaaacatctgcagccacctatcagcactctgagatcactgcaggtggtcggcatgacaatgattttggcgactttcgcttgacggccatctttcctacggccgatgagatggaatgtaaggagaaaccgttttatcgccgtgcggaagacatcgcgcagatgttcagtggccaacgcattgccggctatattgacaaccaatttcgtcttttacgagaagacatgctctcagagctgcgtgatgagtttcaagttgcgagaggcacgaagaagggccgacgatcggctttccatttgaggaacctctttctcacccatattcgctgcacttctggtaccccaagccgccttcgaccatacactattggtgttaccgcccagtctggtcttggaaagctgcagaatctctcagaagatcgtcgtaaggagttcttaaagaccacgcctcagtttatcaagcatcgtgcctttggttgcttagttagagatacagaaattgtggcttttgctacaatcgacagagatatcgatgaactggtatctgaccctccaacggtaatgctgcggattacaggtgaggaaccactcaaaaagtctctgctttacctaaaactctaccatgacgtggaattcttgcttgttgacacagcaatttttgcatacgagccaattttgaggtgcttgtaggcgagaatagaactgcctctcagagaagagttgtttctctacgaaagagatcagccagtgaagaatccaagtctagttccttagggtgtagtcaacaagctgaagaagggatacggatataatattcagcgcacccttcagacctcaataccagtgatactggactcttcacagctgcactccttgttggccggattgacacagagagttagtcttattcaagggcccctaggtaagatcatacggatcctcttatttccactacctcagatacttaacagacaatatgacctccaggtaccggtaagtcattcataggggcccttctagcaaaggccgtttgtgacaacaccgaagacagaatcctggttatgtgctacacgaatcatgccttggatcagttcctagaagacttactagatattggtatagatccttccgccattgtgagactaggatctaagtcgacgcgacgcactgagccgcttggattgttcaagcaacattcgtcctataggaggaattacaccacttagaacaccatcaatgcactcgagggggatggaaatgagcaaaaagacactttgaatgattccttccaagcttataggaatctcacagctaatactacatctatcttgggctatctggagtttgaagaaccagggttctttgcggctctgaccgtaccagaggacaaaaacggcatgactatggtcaccaaaagtagaaaaccaataagaaaagactacctctatgaaaggtggattaataacaaaagcctaggagtatattctgatcttcttcccgctcattcccatgaggtctggaaactggatcagaaagtacgggaggagaaagacatgtcatagagaagagccctattgagtaagtaggcagagactttggcagtcagaatagcattgttcgacaaatgccaaagccgacttggtgctaccttaggcaagaaaaacagagaaatcttgaaattaaagtggtttattggttgcaccactacagccacggcaatttattctaaggacattcggcatacttctcctagcatcgtgcttctcgaagaagccggtgagattctcgaagcccatatgctcaccgcaatgacaccagagactaagcatttaattctaattggagatcatcaacagctccgaccaaagatcaataactatagcttaagcacagagaaaggggatggttataacctgaacgcctcactcttcgaaagacttatataagccaggtttccatatacagctctaagcaagtagtataggatgtgtcccgagatctcaagtcttatacgcaatctcacttaccctagactagaggacaatcagaagacgaataaccacccctagctacaagggctacacgacagagtgatctttttctaccatcaaaattccgaggacatttctactaaggtctcggaccaacatgataagagctcgagagggagtaagacaaatgtgtttgagacagagatagtcttcaaaatcgtgaagtacctcagatagcagggatatagaacaaataagttagtcgttttgacgccatacttaggttagctgagtctactgaagcagactctaagcaaacagaacgatccagttcttaataacctggattcttacgacctcgtcaaagcaggccttctgtcctaggcaggtacttcccactctaagcgctaaatcaggctgtctacaattggtgagtagggagaaaagggaatagttataagaaagagattaacctaagaaaatagacaatttctaaggagaagagagtgagattgttatagcttcactcactcgcagtaataagactggagatataggatttatggcagctcctgaacgcctcaatgtccttctctcacaggcccgaaatgtcctcattctagtgggaaactcagagacgttcgtctctagccgaaagggtcgaaagtactggaggccatttattaatcaaatgaagtcagagggccacctgtataatagactacccgttcaatgtgagcagcatcctcagacaaatactattcttcgaacagcggaggatttcgatagagaatgtccggatagaggatgtcctgctccttagtaaattcacaaggaattttacccttactaatatcctaatactaactctttcttaatagcggtatgaaattaagctgtggagtatatgagtgcccatcaaaatgccaccaactggcggaccattcaaatatgaagtgtatcaagattgtggaatggaaatgtcctcgaggatattgtctatctctttcatgttcttaggcaaagcgctcatgtcgtttctatatccaagaagatgaggtcaaagagcgtaagcgcaaacgcgatcttgagttagagagagaacgacaaaggaagcagaacgagtacactcaacaacttacagaagcctaggaggaagttttctatcttaggcatgtgcggcgcgctgaattcgatgatatggaacgcgcgagggtgcttgaatagtaccgataggaaattgtggggttaaagaatcaccgcctaccagtatctcttcaacgtaaattgaatcttatagcgactaggagtatatctctaaccatcacagaagcaaacacagaataaagcgtatattccgttaagaaaacaatttaaagccgtagtattgagtctacaagtcgacaggtaataccgctgtaaaataactcgtcggctaaaagcgaataggaatatgaaaaatagttctccaacgctcaaagccaggcgatcgacaatttgatagacataatcggactcgaaacagtgaaagcaaagttcttgtctatcaaatggaaagtggacgctgctatcaggcagaatattgatttgagccatgatcgatatggatcagtattgcttagaaatccaggaagcggtaagacaaccattgcccgtctctatacaaagtttctatcctccatagggatcatccccagtgacacattcatcgagatgaccgggtccagactcacgaacaacggtatttctggatgtcaaaaaaccatcgaaaccctcttaaaaagtagcggtggtgccatattcatcgataaagcgtatcaactcctcagtagcagtctcagtggttcgcaagttctagatttcctcttagctgaagttaaaaaccttattagaaaagtggtttttattcttacaggttatcaacgaccgatagagaagttcttcgcgcataatccagggcttcccagtcgtttcccgcataagctttagtttaaagacttcgatgacactgagttaaggcagatcttggtcagatacatcgagaagagatacaggaagcagataaaggtcgacaataaccttagaggactttactatcgcattatagctcgtcgagttgggagaagacatggctgtaagggcttttccaatacaagagctattaaaaataccttgaccattatcactaagcgacaagctgcacagctcagtcgagaaagacgataaggtgacagcaaggctaaggacttctttctaagcaaggaagatctgattggccctaatccatcgcaggctctgaaattatccaatacttagcagaagctgtagaatatgattaggttagacgctataaagaacacagtagaggccattttagataccatacaatacaactactagcataagctagataagaaaccactgattaagtacagtctcaataaaatctttttaggaaaccccggaacggggaaaacctcgatcgcaaagatctacagtcagatacttatagatatcggattattatctaatagcgaaggtatgctatctcccatgctctctataagttatactaacaatcacagtcattataaaaaacccctcagattttgttagcagcgttatcagagtccgaacagaataccaaagggatactcacatctacaatagggaaagttctagtcatcgacgaggcctatagactctttactagaggtatctcggatagggcaggttcccagagtaactcatacaggactgccgtaatagacaccctagtagcagaagtacaaagtacacctagcaatgataggtatatcttgctcctaggttacaaagaactcatagaagagatatttcaaagggtcaaccccagcctcagtcgacgctttccaatagaccaggcatttgtctttaatgacttcacctcaagtgaattggatgctatactaatactaaagcttaaagaacaaggatttgacataaccgatcgtagccgctacatggtattagagatacttaagcgttctcagagttgcccgcgttttagcaatacaggcgaaattgataatctactcaacactgccaagatacagtgctaaaagcgcatctcatctagcaaaggcaccggctctgctccagattctatccttaatgctcctaactttaacgaagactttgatcgcgcagatagaaaggaaagtgttataaagatatttaaaggcgtcatagggtgtgaaagtatcgttaccaaattagaaggctatcagaaaatggttcagagcctcagacgactaggcttagaccctcgcacacagttgccatttaattttattttccgcggtcctctaggtagacaaacctctatttacagtcttttctccactaaatattactgacatataatccccctttaggtactagaaagacaagcacagccagaaagataggccaagtctactatgacataggcttattagcctcgagcgaagtggtcgaaacctcagcgacagacttagtcggtcaatatgtaggtcagacaggcccgaagacccagcaggttttagaacgtggccttagcaaagtattattcatcgacgaagtctatcggctcgctaagggacattttgccaaagaggccatagataagattatcaatagtattaccaagccccggtttactcaaaggttgattatcgctctagccagctataatgccgatatcaatcgtcttatatcaataaatccggggctcaccagtcgtttcccagagtctcttcaatttgatccattgtcctcggcagactatgtcaagttagtttgcgagctcttgttaaaagaaaaaggaaaaatattagtcaaatcacaagcccagttcgacctggtctgcttaaagagtccaaatattaactttatgaaggaaatgttacagcgctttgatagactttcaaagactgcaagttgggcaaatacacgagacattggaactctcacaaagacaatctttggcaaattgctacagtcattccacggaaagaaactagtgctaagtgaagacatggtacttcaagcgttcgactcaatgatccttgagcgatctagccgagaagtctacccgcaaaagactccatcaactacaatccaaacgagcgataaaatagacctggctctacgcactcagtcgttgagcaaccttgctaccacactgaaaagtcaaggctcagtcaacaaggatgtggcttctagcaagaaactcgacactatgggtcccgaaacagacagattcactaccaccacaacgcgagatgttggtgttacggacgatgagtggtgtcaactcgaaaatgacaaacttctggccaacgctaaagagaaagagtactcatgcttgaatgacgaagaagaacaacagaagaagaagatattaaaattaaaggaagagggggaaaaagcggcacgggagctggaagatgcaagagggaaagcagacgaagatgccaaaagacgccacgagcaagaccgactgcagcatgagttagagcgcaggagacaggaaagattcatggagaaactccacaggcagcaagaggctttggctgaggcccgtcgtaaggaacaagctaatcagacgaaattgaaaacaatgggagtctgtgtcatggaatatcgatggattaaacaaaacggaggatatcggtgtgctggtggttcccattggggtcggatgcgcagcttggaggttcctgatcttgtgatattgaagcacgagaaaattatctatttttagtagtcctttggaatttcgttgaaatccgacaaaaatatgatgattaggggcatccattggaaagcaatccaaccgatagcatggctataagctttagagctttgaagcgcacgatatcggcgctgtttttccatatcgacactcggcaacgtcaacttcgaagtctgccgtcattatcgtcggcgatatatcgtcaccggtaattggacaataagagaaaggctcctgacgtaaaggaatttttcacgaagagaatgtaagctgacttactcttttgttcggatcatgcgcttccgttgtgtagtcttgcgtcgtgttgttgccgtaaaatgcgacctggtatttagatatcttctgttgctctccagtcatatcaattagctctcctattgcaaagtacatgtccaattctttctatgtcgcttccaattccctacgcacaagtgtacatatgtatctacatgtaagtatctatactaatgcatattcacatcattgttttcgttcctgccaacatgctttgatattaccaggtctattttacggctacgctttccttcttccgttatgctatatggcagaatatccaaaggtcacatgggttcgatttcattctatggttttactctagtagattcgaggtgttcgagaaaatgggacgcgtgccacgacctcttatttgttgactctaaagctcttccagaaattaaccaagtcgacatatgattcttcaactcagtttccactgaactactggatccacgtcgacagtgagctgtggatagcgagatatatgttcattgactccgcaccagtcgcccagtgtacccattccaaaatgtgtacccagtggaaacgccttattttcccctctagaagagttaaaaatacaattcatacctctgagctacaacagtccgcagtgctggtctcaaaaagggtttggcagtcgtgagggtctgagagtcttaggattcactacagttccttgggagctctctcaagactccatcatccatgatgccgtacttctcgaaggacactctcagcctcgtgactcggacaggtgggtgctattgctggctcgtcgaatctcagaagtagtaaagagtcctcaattcctgttgtgcttgaattggatgagctagaaagaaactccttttgtcgactttcaagaatcaggaactatcaaaggacttcctggacttcagggattttggcatggcaattcctccaaagtaatgttgcctttgctggcagcatataccctgtgctggtaagatgtagtcggcaagtaattgacgagagtaatgatatcgtctctccagacacgagagacttttgcttttgttcaagcccagaatctttagcaaggctatgcggggagacatttcggcggcatgtaatgaatggatttcgttccgcgtggaaatattgcgagcgatcttcgatatctcaataacccacactggcggcctctgaggttagcgtatctctaaaaaagcggcagcgaagtgataaggaaaagaatacgcaaatcaggtcgccactggttgttgcacacagcccctccttgaattcctgggaaaccacgcaagcccggtgttccgtcttgcccaatgttcccagtgcttccgatcggctcttggtcgcccggagaccccttaggccctggaggacctggaattcctctgggtccatcactaccaggcaatccctctccctttcgaggtccccgcaagcgttgtctgcaatatagacaccatccgagagcgtttgccactgcaatcgcaacaccgaccaaagcgcctattgaggcagtatggctttgttgatcaggtctttctggttgctcagaatcagggcttatagtacttggttagtaaagtgtctccttataagaaggaacagagccaagggtcattgtcgtcatgtggtgcgatccctagggatgggtagagtaacgatcttgaaaagcggtaatcttcatgctatagtttgattatccaaaacgcgatggcttctcaccaggaaggggggggggggttcgattgagaaggcttcgcctacgaaatacgctcatgatggtggccggggtggtatctgagaagccttacgtgggcagtgtatgaaaggatatgaacaataggtaggtatgggccctcccaaggctctgcttcgaccgtaagaaaagggagtaggactccagctaaattgatgttttttcatatgtaaaaaaagaacgcagaaaatcacaaacgttcgaagtggccaggcccagaaagatgagtggatatacacattcgacaaccaggtcatccaattattcaatcatggagcatttgtagaatacgtcagaaaactcttccttcaacttcgcaagcttcgctggtgcagtcagctgggactctatttcctcccatttccgcttccattcttgttgtctctcgacagaagaggttggccgttggccaaaacagtcgccttctttctgcttggctccgggcgtagagatgtccaacgattcacattcgttgtgctccacagcgaacatgctgcgagcatacttgagactccatttgggttgtttcccaagattgaccaacacgttgtagtgaatcccttcggtttcgtggtgctcgcggcatccgtaatacgtcgccatcgtaagtttgttgcgctgtagcatatagctaaagccttcttctaattcatctttcaattcaagagagcattgtgaataggtcagaaatacccatcgatggtgcaatcgtgcttcagtgtttactggattttcgagggaaatctcccctttcgggaggaagacttggataccctggagagattctccggctgaccgctcttagagaccgctttaaatctcccgaacattttgatttccaaattgctcatacttcgatatggaggggtaaaccttccttttatcttattgataacgtcgcgtggcgtcgaggcacgtagtgccaagaattacccgaaagggtaatttattaagtcgcacagggtccccgagggtcacagttccatgccaagaatcgcctgtttagggagcggtcagaccacgaccggggccttcgggctcacttacagtacgctgtcccgaccaatggtcggaggctcttatgcggtatccgtggatccttcctgtaaaaagattacctccgaaggggaaattacgttgagtttcaagtctcaatttttggggcggcagtgttataatggagagtggagacactttatcccaaaaagttgtccaatcaagtctgaagattgtggaggtacggagtatacagtagctgcgacgccttcatggcctatccccagcaacagcgcggcagttattcacatcgacggtgtccccggtggtggactatgcctccaattcctggatgcacacttcaagaataaaaacatcgggccgatcagcagagtgcagagggtgggaacgcaagcgattattgggacattatccacagttgcgaccagtgtagcggaggcggaggcttacctcgccacggtgtaacattggctctggagacgagctatgaagatgtgtacagacatgcacaccctaccggtaaccaatctcctccacaggagtacagctcagatcagggaattcaggagataccatcgttcaccattcaccgttcaccattcaccgttcaccgttcaccgttcgtcattgtaccaggtcgcaaaagcgctgaaaagtatcgacatggaaacactggcagccatccatccattcaaattggcactatgggtgaagcgagttcagagcgatagtcaagatgtaccggagacacagaccgaagcgggcggagttatgcgaatcttggtcaacagatcagcgggggaatgagatggtaggatttggcgtggcgagtgaacttaaatgacatctgagatgacgtacaccaaagacaatcctaaatgggctgcaaggaggcatatcattagctaaggcgtgtatatgtagatctgtgatagttgccctttgggttcagctgccgggcgttattagattgtgtgtgtatctacaaaattatgttcccgcttgactaagaggatattggatacgaccatttgatctgatatcacagcagtgatttgtccaatttgatgacaagatggttatgattccgcacaaaatagcaatatacttttaatgagttaccaatgccagcacctgaaaatttgccattttatatcaccttccaaatggtcacatttcaatcaactgtgacaaacacttcggattatcgaacggaccagaaatattcccactgcagtacgcaaagccacgagttggtgttgaaagcgtcacgcagatccggtctggcttggtgctttagctgctattcttgcgaagctatgacgagaatgcgagaactaatagtggccgataagaccaagcactgagagactataagataaaggcaattatctacgggcaatgcatggaataatgaattcataacatgtcggtacttgttagagaactcaaatgattatgatcccatcggccgttgtttccattctccatcataactcggtccacatgaaacaatccttgccatgaatcacaggatagagaatttctttatattgtaccatacatgtcataatgctatgtagcatgtcaaacacaaccctatgaatgtgttctcactactaagtgtaagctatacgagctccgaactactaacaatggcttcggtatttcatttgcaacaattacgttcctacaagcctgctttcgagatgatgtgtaatgaccccccgagatgccagtgagcgatttctttctcaacgtatctgttgcggaggcgtttatttgtctaacataattttcaaagtgcgcatatctccgttcatacaagccaatctaatgcatgacatatattcatgatcactttctggcagtagtaagtactgctgcaaaacgatatttagaatcttccgaccgtcatctcttgttggattgacggaagccaatgcttggctcatgccttgtatgacttggttggcatctgggcaatccatgcggagcgcttcgaatttctcgcacatgtgactccttgaaaaactatacatgctctctacagctaagcgtaggatggattggttttcgatgtctcggatgctccactggaaatcaggaacaagaccagcgagcagttccaccaagcagtagtgttgcccctttatggcttttgacagggctgtctcgccaaaattatccaacagactgacatcagctccatatttgatcaaaagtttggctgtatcggtattcttggataagacagctgacatcaaaggggtatttccgcggttgtcaaagctattcaggagcacttgcccatgttcgggaatttgtagaacataaccaagaagatcgtcatatgcatttgaggctgcatagtgcatggctgatgatcctttcgtattagagcccatcaaactaattatccaattagagttctgagaaagaatgtagcaagcatcatgttgtctcttttcatttaaagcggtttcgaacgctgctgtcagttgttccgaaaactctagacccgggacagtacaattcagaagaaaattcatctttatagcaatcccttacaactttagttgttgagtgttctatctgcaactgggggagatagtcgactttaatagggagcaagtctactttcgctcagcaaaacgcctcttttggctaaatatgtagctttagaggatgaatgagccatttcaggaacagccgtaaatagaacgatgtgaatttgggtaaacgtctgagactcagacacgtattgaacactattttcccataagggtaaacggtgagctgctccagagtgaaaagtcgcttcggagagttgacaactcggtaaagagccaatttactgcatgaggatttgtgatgactcaaaaatagctcaccttcgcgtcaagccctaaatcacctgggcacagtatatcatcagtctgaaaattttgtaatcaacgcttgagagtagccattctgaataggcattctcattatagcttacttctgagctctatgaaacctactcatgcattttggagagataagaaacaatatcaatatccatgtgtatatacagtacacacgatgcttttgtaaagctgccctgttgactaggcgtccctgaagtgtagttcgttccgaacagggtaatatgaaatgagacaagctaagcacctaccgaatagctagtgcctaaagaacccagaaattggattcaatgacaaatatcagcttcgaaattggtaatcatgcgatcgggatgaaggtctctgagatgaacacagagaaactggagttgaagctgctgtcgaatatgacttcactgtatgtatgtcagtaaaatggtgacaactttgtacgtatagattctaacttgtagttgatgtaaaggcgaaggtagctactcaagttttccacaaaaaacacacaatttaattgttcgcagatctcatttaccagctgctttgcccgaatcagtacttattagctggggtatggccatgcacaacctgctgtcgtcaccgctgtgaaaccagctgtatacaggtcctgttactatctactctggttgtcttcaaacaaaatttcgcaccattttactacatcattagttgcaattaagacactgaggcttatttcgccaaatccttggtcaaacagtcaaagcaggactgcagaaaaaatagcttaatcacatgatgtatagagatcaagaatagatcaagaatagatcagaaaacttttctgtcctatttccgttatttcatacttacttcatcaatcccattacttggatggactaggcatagatgtattttacgtaaaagcaattgaatattgctatttttggataggatcaacgtaaataatgcgtattttaattttaatgttcctagcggccaacgcctcggtgactcaatcaacgcgatatgcgtcattaaagcgagcttcttcaaccacccactctatccgtactcaatcctctggtaatttgaatgatgaaggggagagaagtcggatatatttagccaacatcaaaggaaacaggaagtgtgagatctcattatagtagggcgtcgccctgatgtaccaaaacaccgtacgccctcgcctgttaaaggatgcgagaagtctttcgccaatcgctataattagcctcgagtggaaatcgtaaattttcgagcggtgtagcatgatgcctttattttacacaggagagtggacccaaagtttattgagtagcctgattctgatcaagaggtgagtgggcttgccacaacctccctggagagcctgtgcccctcgcaagctagctcatatgagattgcgaaacaagtagattgtgaaggcgttttagctgctaatgtacaaaagttggaggttccaagccgctcgcggatggtttgacgatgtataacgtgcgctagtttgaaaccacatccaccgcgatgaaaacaatcttttattgggcctgatcgtttagtagttgtattgcggtcacctcatcccatccgagatcagtatcaagtctttcatttggtttaaatttgtattccgccgtatggtttggatttctctatttctcgaagccaggtttaaatacaaatttggcacgcactgaacagaatgtgtcaggcatacagaatggttaccgttttcttacagctactttttatgcggtggctcattgggttgctgtggataagtcctgtaactttgtagcttgatgattatttagaattcaagttgtttacatcaacacgttgccctaaatgtacagtagcgaccgctttcgccttccatgtcgaacaacactgaaaagcttttccaaactctaaaaacatgctgcgctaacccgtatatagttatttccgtatttgagaatccgtcacaagggccggatggtataatactagacgcaaagaaacggcttagtaaggtatctgtattgtattgttacggttcatctccagaccgaccctctcttcccctcttctgactaccaacggcagacctcagggaacttcactgaaggctcaaattagaaagaagctggaaaacagcatgcaagtccctacggagatatacgatcatgtaaggcctaggattgtgtcagttgatcttttcttttgctcggtgcttaacattccttacagattgtttatcgtgtttggaacgtatacaatgagttcttatatttggcagacgatgctaggaaatacgcgacctttgaaggcagggctcgacgggacttggcaaacctgcgccttgtcaacagggccttctgccgcagcgcgtcaccttggctgttccggcatgtcaacgcagagtgtacttccacgctggtgactccacctctagagcggcttatacaattatcgaaaagcccttatgctacatgtgtttgtcaaattgacttcggctttaaggaaagccttccatcggataccagcacattatatatcgaggccctcgcagaatggcactccttccttctggtcaaattcaccaatctcagggcccttggatttcatgaaccgcccttatcgttaccgcaagcccagaaagcagtgtatatggagatagctatctctatattgcgttacgtgccgcttccaaacctgtcagaacttgaagtcagattttctattacccacgactttggacgtttctttccgaatgaaatcaattctttacaaatccctatcgaagacattttgcaacatcttcgacacctagaactatgcgtttgtgcatacacggattcggcggatcagaggcgcagacagacgccagttttgccggaatatgctgctcttcccaatggcacctatgccccccacttattcagaatggttgaaaatgcgccaaaactcaaatcactgatattgtctagtgtcaatattttagatttcgactctgtcacctttccatctaccgtttgtctagagtctcttcatctaggaggggtttccatctcatctgacgttctcctttcgcttatcaaccaatctgcgcataaaatgaagtacatcggtttctggctggtgaaattaaagtctgggacatggcagcaggtgctattgcaactgtgcaagttaccacgccttctcgatatcaacatcgattatggtggatacacattaacaggatcgagctctcatctggccgacaggctatttccaagtccggagtgccgtccagatattgaaacgatgcataatcttgatttgattgaacttggcaatctacagtggcaagtcaattcgaacaggatcgctatgggattacaacctttccccgatacagactatcaacatatcaataagccatcactggagtttgaagggtgatttcttgtaaccaccaagaagcttaaacagacagtgtgattttagtcaggttgaaatccagggaattgattttcaattttcaatagcgatagttcagccttctatgcttccaagagaacgcgttcgtgggagtggatatggtaggcgtacgacaaaagtaaccgggggtgggaacatattgtgaatgttcgtccttgttggccgtttgtggagatcttcaagtcttgcaaggcagatacaatcagacatgaaatggaaaagcaatgtactgccttttgttgaataataatggatcgtcagggaagggaaaagaagaaggagggtagagagagagaaactatctactgatgaattagatctgtcccatatgactgccttaggcatcgggaacccgacatcaagtgaagagatgcctaagcagatggaaatggaagaggttagccagtaacctctagtgtccaatgagttccaaagccatggcatgattgatctgcagtggtggaggttgtgaataagccttactgtcgaaccttgcctactacactgactcggaactgactgctacaaagtaccggctgtttgcagtgatgcaacccgcaagattaaaaatggaactgttgacatattacctatctaaagacttatgcttgccgattttgtatcgaaccttccagcaagcccaaacgtctagtcctagatctttgtattttccatactggtattttaagctcgtggtatttattacctggttaggtacacatcgaattatttgcgcactattcatccatggattagcacatcatgtgattatggtttgatagaggatccctgtgttcccaacatggaaggcgataccggtcgctactgtaaaaccgtttcagaatatagaagatggccttgctatcctgcagacccgatcaaaacgagagaatattctatcaagtatgatctaaccaaacacagagatctaaaatccactgaccattactgttagatccgaatgcaaagcccctcgcagagcgacttacaggtcttcctcttgctttggctaccgccgggacatatcttcaacatagtacgattgactgcgaacgctacctcaaggagtatgagaaacgttggaacatcagccgtcgccgaccattacagctccaggagtatcaggagcgtacactctacacaacctgggatctgtcatactctcgcctagaaaaggaagatccagacgcagcggaattgctgaaattacttgccaatttcgacaaccagaaactttggtttgaactttttcatgccggacttaccgatagctctcccgaatggcttcatgaagtgatcgcctatgacgtaaattttaacgacgtgatggcagtcttggttagatactaattacgttatagtggaccttctgttggatgcccggatgcctaaggcatcacatgtaaatagaacccagatagtttgcctgctctctcgtcctctctttctcctcttcgtccaccagaatacatacagtgctttctctatgaacttacacgtattgtatcaggttatgagcctcttttgctagttggaccactagcaactcttttctctgaagctattttcatctggagacttttgacgatctgaccccacagtggatccacctttgtacgtagtatactacacagattcggatccagccaataacatccaggaaatccttcgagccctaccggtaaaagctccgtttagtcatctttttacatcatctcaaactgtctcgtccaatggagacagcagtcctgggggagatagcaacatccgtggaggctactgtatacttggacaatgttatgcataattctatcctataacgatatacgaggatggtaccagagcaatccttgcatccctcatggttatcaccctatgcaaaactctacccatgcaggattcgctagttggctatatctgcatgatgaattttcagtatatattcgcatttttaccagaatttctgtctctggtggcgaaaagtatgacctaccaatactttcaagcatgatttcccaacgctacgactaccgactgtgttttattttcattcttccttagtacggcgataatagatttgagtatgtcggatatacacctcaccgtagttaaatctttcggccgatgtctcaggtttttggaaagccttgatttcgtggaatcatttttctaaccctgcgagacttcgtttctgggattttcaaaatttgctactgtgaacctgtcttacttttctacaaaggaactctactacataaattgatcaatttctagaaaatactgacagcgtacgtaaaatctgattatcattcaagaatattgtgagtgatacgacccagtatttctccagaccatcttagttcagatccatctttgagtttattgcattgggactttgactgtctttggagatctacaaaatgccgtgatacttcgtcacctacaaggtgaacaacatagttcgaatcttgtacaggagctttgtcacaatgcgaataacacatcaggggtagggcgatgccgccagtgtcatgagataccaaagagcccgggtcgtctttacttgaactgcagggttctagtatcaatcaagtaccaaaatgacgatcggagaagttgtgagatggaacagttgggatccacagataaatcccagcagagcaaagatgacacagttcaaattgagcttgttttggacacttttcagaattgaagtgaagagaaaacccgcgcccctcaacacctgctcagtccgacgtttggcacctttttggccaatactgtctgtattggaagggaatgcttgctcttctatcgcattagtcgatggtaaaactgcatcgtggtcttcggttgtcatactaccatgcgctttctgtgggtctgccttgtggtttgcttcccgtacggtgtcctcagctgggggacttttcgaagtgcgacttggcatatcattcgcatgaagccgatactctccatacttggcagatccttgcggggattgatttggcaggccaacttggcacaaccgactgggcataggctcgcacaagtgcctggcactgagcctagcatcaaaaatacggttgtgcgacggtaatcccagtgacggcaggatagaaaaatcgcgctctgtctctacactcgcggtttggccgttgatgaccctctgggacgacataggcgaacgctgaaaaggcagctcctgatccgtctccagaggaagatcgaaataaagatcaataatttcagacggcctcaaaattgatgaatcgggacctgctggagggaagtcttcatgtacatttagactacacccgagaacaatatgttaagataaaagcttaccagtgggcgatgctttgatctcatgagttatttttcttttttttgccgggggatagcatttgtctgcagaactgccagtggggctgggaggaaccatgagtttccacttttccagagcaagctgctctaatctatcaaatttgcagcagcgagttcagtttatatgctctgaggctctattcaagtgcacatgagcggccataatccatttctagtttttctcaagcctatttatagaactatatctcactatggcgtgactaggtttgcctcatgtatcaacaaacaacccttttcaaactcaaagccaacccagtttgtcgaccttgctggaggtcctccccagatacatgccacaagaaaatattatttgccaacacacgctagtccacattgatgggattgggttttccggagcactcttgccagtggcctgtattgattcgtacgcagaatgacgagagttttcagcggggtgtgtttattcacttgtatcttttgacatagctgctaccttgatatcctattttaagaattgtcgtcccttttcgtgagcaagcagttacccctagtcatgcaagtgccgcgattggatgatcccattgtttaacggtatgttatctcctgaaacaatctacgtctcaggtgatattgcaactagcatttggtctgctattaaatgacgaactgaggaagtagtcaaataccactaggaccattcgggacaggcttattcatcgttcacccaactcccccttgtattagtataggattgcgcgcagacttggaaatacggtgttgtagcacgccgagggtcgatcttcagcgacagtccattggattggaaatgctccaagcggcaaaccagtcaattgctgtgaccggcgataaggtattgaacagtgtcagcatggacgcgactctgaaaaggtctatcgctaatgccgggcttcggccgagccaggcttttcttccaacagatgcgaacgctcgctttaatttgtttcggctgcctttggtaccgctcggcgactgatcttttgtcgagtcagtatttgtccggcgccaaagccttcatcttcttcatgctactgatcgttttgcagccaagttgcacatgacatcaatgcgtgacacagccatttcgggtccagcactgcggtatgcacattcccaggttggatgttatctttctaccgaaaactacacacaaattctaggagttgagacgcgccctatgacctacgttcaaggtcaccaaacagacgtttgtcgagttgtttatggggaagagaccttgatcgtgcctttggtgcgggatggggaaccagtggcatttgggtgtggacaggtttccaccgcttgccatgtttcttcatgtgaaaatacccagtgaccattagcaaaagcatcttcaaaatcgtgagacagtccttcttgttgactcgcagtggccaaccaatcttggagtttgtgcaacatattcgtcaccttcatgcctttattcgcattgttttgatcgctggtatcatccaggctgaatcggtttttactagcagagttgcgcaagagctctcgcgattcccgcgattgtcctttgttgctctccgcctgtcagataaccaattcaccggcacagcgaacaccgataccggacatagactgttcaacatcgtgcacctcgatgacacagaagcgggagcatgatgtcttgtcaagattggctttcttgatcaatcttgtctggtaaattcaatcgtgatggcagtttctacttcagcatggctcgaaatcataagctccgcttttcagtcgcagcataccaatcctggaaggtagagactgactcgagaaacacgcgtcgggctcgctattcatgtatttcttgattctcagccgcgacggccgaaaatttgcgcgtgatctattccgcatggagttgaggtagacacaccgaggagcgaatatcttatcctagtggtgcaaccttgggtaaatctattcgtgtacatagtcgaggaccctaggcgctgggtgaattcacagcgcagggacaagtcaaccggatgggtacatctcttagctgccaaggtttgaaagaattcaccttttgggtaatgagctagcctaataggtagcccatgcggtctggggatgaagtctcaaagaatccccatgaggttgagacttgaacttttccacctccacggtaaatctcaatttctagcaaggagaagtcaataggaagagcgcagccaactgatctcctgaatggataatcgcaagtgccaccttcaagtgttgtgatatgagctgttgcagatcagaaatcaagccgcaccgattctatatctgaatgaagtccgaggtgtatttctataggtgcaaccatagtgattggaaatcaacatggcccattgctcgatgtataggctaatatatcacgctggattaacaactcaactaatatctgtggagcacagcatcaggcaaacttacagctgacgagaatcttaagcctatagccgagaaaacaagagaaacctttccttcattcaatcttacaaaaatggagtgtgttcttttctttttttttccccttcttgaatagtattagccgttcgacagcgtccactcctaatcagatccagttactaatacccagatacaatcagcaaaaagggaaactagaccatgctcagcgggcaagagcaagtcccgtcaaatatccaccccacctgtagcggaatcatcactctcagcctctacgctaacctcaatggggtaaaagggaaagccccgaggcctgaacttagggtccatatgattttctcggacgctacggccggccccaccttgacggtcaagcattactcgtagctcttcaagggagagattagccacgcccggaccgaggtcggtttcaatgtcaacaatggttgaggtgcctcccgctgtcgagtccgcgaagcccatccgcttaccgacactggtagcgatatcgttagctaacgccctcctgacggtgtcgatcatgcgagacagaataccctgttgatgctgaaagcgcgtcgcggcattgttttcgtccgtgtggacatcaggaagctgccagttcaggtagagcttctggtgggaaggggggctcgcatagcctcccggatggcaagaaatgaacaggtggcagagatagcaggctggcttgctgcatctaatgtacctgtccctcttgtcgatgaatctaccacccgtctgctcaaagtgattgaggactaaaagttccgtatgcacgcgcgttttgcctttgcagacatccttggacagcagccgatccagttccttctttgagtagatttgttgcacctgctgcaggaatatatcttgtttgaccggatcagagaaaatacgatggctgatattatcaatgtcgcaagtacgggccaaaagagggatttggttctcccgcgacctgccaatcgtttcgatacgtaagccacgcgatagctctaagcgaagcctgatggtggcctcgatcagtcgtttacactgagccacgtgcttacctagtttgtagagcagcttatggagtcgcttaaagttacgagattgctcaaggctcccggtggtgtgatgtaaggccttaaatacctcccggtccctgtagctggagagggctagacttggcatgtcgctttcctgaagctgtatactgctctttgaaaggtgctttgcaaaccatttgccgagtttgatgatgctgttatgatctactcgtggtggtagcgctttatcagcttttatgtccagtaagagccgctctcttagcagacagggctgcgtacctttcaatctagactcggcattcaatcgtcccatcactaacgagaccagtttgttcacctgctgatagtactcgaagattttgggggcgttgaggtccagcacgtgggcagctaaaagtttcatcacttctcggccctccttcgtgtctagtcgaaccgatggattatcgatgatccatgaaagaatcacgagaaccttctctagaagagttctgaccgccgcatcaatgccattgttggcagctagtagaaccactatcgtatcgggggtctgttctagggccgccgcggtgacgtagccaggccttttccgatacgcacatatataggctatggcgtccacaaaggatcgatagcttttagtggcacttaatcccgggccctcggggaagatatcacctggctttattcgatccccccggacttcgcttaggattcggagcaagcagagaggcttatagagtaaccgcaattttctagtcttatgcagcgaagcctctggaagtcctccgctcattgcgtcctgctcgagcatttttttagaataatgatcacaagcatacagagtgttctttacgtgtgaatgtgcccactctaagtatgacgcgcatatatataatctcaagttgattctctcagccccgttatacttcttctgactcactgcgcccgggcgatctcatcgtctatctttgctgcccaacgctagccattattttgttgttcttttattccttttcctttgcttccagtggttgcgcccccctgtcatttcttgcaacggctgccaacgagtatccctatttttcggttcttctcacatgctacatgacgcaagttggattggagctatgtcacacggcgtcgatcgtcgtgcaaggctctatgtaatccagctgtgcacaagaatttccctgctgcagtctcaaagttgagagttcatattcgccatgtatgcgtctcttttcatttggcggagtaaaatgaacccgtgtctgccacgaaagtcagttggcagtacgaccaatcccgcatggacaacacatgctagagaaagatgacacgtcacgccctacatcacttcctcgtgtacttactcgtgtacttactttgagagcccgttaatcgaaaaatgagatgccacgtctccagactaagaccttgcggtgagacacatttggccaatttttcaatttgtactggttgaatccttttgtaggaaaatctcacaaaaagggagtgggaagaccattgatggtgttcaataacccgccgtctcgaaaacctgagttactgctttgctatcagtccaacccattatcatggccggcctgcaagacaacagtcaacttacccactccaacggcgagtctcatggccatctatctcccgcttatatctacactaacgcacaccacctatagatattcttatcggcacccttctctttcaaatatcagtaatttcatccttcgctagctctgggatgtcgcacaaggagactaaggttagcgcgctatttcagccacctctagctggctgcgagactcacgcagatacaggactattgcaaagatgcttttcagacattcaactggatggaaataaagaggtctctcaaaatcgtcaaagacactcctcgaaccgctatcggagaagatagcagtgcccggaacctcgtagttgctttgctaggacagacctacagactttgccctgaaccgcaaagacttccacttttatggaacctcgccgacatattctctccttttgctaccggacaagcacatcgtcgcagccacggaatgacgagtgtggaaatgtccttatcgagttcctccagtccaggtccctcgcaacctggaggaaatagttctcacgcagtcgctctccatcggtacacctctgcgctacacgagaggggccagagagagaacaaaagtcttcagcgaattgatgagcagacaatcacactggatccgcctttgtttatggtaattgttcagtacagaaatctcacctgctccggtagggctcgaacaaagaaagaagctgcgcacttgggcgccaaggaaatctgccgccaattgaatgaaatctatcattagtgtgattattgaagagagagaggcttgatggcagtctgacgggcagctaagtcgagatagacaagtaaactcacactcaggaatgttccgcagcagtgttatagcgcaagagatatcactgaaagaacagtaggtcaaaatgaacatatatatatatatataaaccgatccagctggccgatattcataggggctgtgtgtctttgtgcaaaacatcagaatgaggcaccagtgattaatgggcgccttcaaaagcaggcatcgccgctaacacagaggagaaatcagagaccacttgcaaagaggctatcgaccagcaacatatctcagaaagatcgcctaatatgcttccttgaccgtccagctgttgtgatttttttccgctgctacttagctcactgcgataaagactatttaaaaggacgaaattcagctcaatgatcagaacgaaaaagtattattttatggctttagtataaaaagcccacagaacactaccaattttctagcggtgcagttagacaaattcacgaaacaaaacattggaacttccgagtgggtagagctaatcaggtgaaaatgccttaggcactcataccataatacagtatgtatggccaatcatgggtgtagacaactctgatttgtaatttacccctatattaacaatttgatgtgattcccggcgggtccgtcaaccctgccgaaccgtcaccccattaaaacttcaaattttacattttttcaaacaccatttacatcatcaaacagtattaaattagcaattaagatcttctgtagagaaaatctgaattgccaaagtataggggccaaaacaggaagtgcaggttcaacctggagttctagcgtaggtgaagcataagatgtataccttatactactacctccctggcaaccaatgtcagtagtaaggcctgatacctttgtttaactaccaatattagatatttgcttctttgattccgccctttttatcgtctgctttcggtttccctctcgtgaacgcttgaaaccatcccgcattaagatatgcttgtgccctagtttaaccgacatgttgtaagactgttgaagatcacgttttgtagtcgaagagatcttattagcagttaaatccggactcatgtcaagcctacatttgcgattttcgctgcttgatcgtccgagggataccggtagatttattgctacctgatgttgagccttgtgatgatggtcgatctggtagaggcggagattaaagacgaatattgagctttataacaaccgattggcgcctaattgtattagacctgtagctacaaaggtactctgaacaatagaatctttaaatgaatcgtcacgagctgccggaaagatatcaagaaagtcatcttttttgatagaatcgatgcctaaccggattattcggcaacccgtgatccatagacgcgctttaacacagcaaaacgaccaacatcaagaagtcgtaaaggatgagaggcatacagagacatatagattagtataatgttgttttcctggcaaatcttatcgaatgttgctgtaagatgactgttatggccattgaggaccaaaagacgatgttttctttttgtctgatttatagtatgcagaataaagagccttgagagccgataaacgccaattttataacttgtccagctatttagactaatgttgagagactaatgctttggaaggtcgttgaaccatcgttacataaaaacttttccccttgaaaacaacgtatggtggaagcgctcgtccagaggcgcaaattggttcaataacagtcatctattcacaattgccagcttataaaacgcccctccgactggtgtgactgtgtaatatttttgtggtcgcactgattcccatcgcaaaccctgattcgtcaatgttgtagatatcatcggaagtaataccataatgagtgattgttctttcaacaagcttaaattattcaatgatagtatttgggtcttccaccagggcgcgtttgtaatcatatttgcgagagaatcgagtagtaagctcaggatgtcgtttgatatattgtgttggccaatttttgccaacggtctggagggtatcatctccgcagtgctcaagcagtaaattggccatatctttcaacatcgcgattgtaagcgcagcacctctctgacccatagagattaaccaatcttgaattgatttctcttctagttgcgtgaatttctggcctgtgccccttgcttcatagagattaggaatgcctttcatccgatctacaagagtcgtgcggggacatcaaaagggcgagcagcggtaacgaccatagtaagtctaccattttgaaaagctttgatagctaagaagattttgccctcctgctcgattgactttggggccttttggctgcgctttgggggcatgataggcgcttaaagatagattgttgggagcagaaaattggggtgggatgacggacccgccgggagtcacgttatataaggatcggtaattactaggcctcgccaaacgcgggttcggggcgggttttcatttttccaacccgcccacgggtaacctatcgcgggttttgtatttcacaaacccgcccgtgggtttttggaaaatcttcgtgggtacccaaattacccgtttatacctatcaaaatatataactgatacataatatatgattagttagtctgtgtatttttggtaatttattttggtaccgatttaatataggaaatataatctaataagataaaatatctacccctaaatatatatattaataacggacaatagctatactatattttgggccgattgtctactaccctatattttcggatgctataaccagataccttaaatttaagtaggtcctagtcatataagtatcttctatattagaattgtcacccaattgagataagaaagctagttagataataataaatatatacttaaggttgtttatagtcgcgcgggttttaggtacctataggttaacgcgacctataaaacgcgttagaaaaaaaaataataaaagagtcctaatctaaggtaatagtatctctgactatataatactacattagatttgaaggctaagcctcggttacattaagatttttagaaaaatgtcgtcactattaactaattgatctttaagtctcttacccttaattaaaccgtcctctgattccttcttagactctgatttctaatcctcggtataaatattaagattatatatacttaaatcttacccccctattcctaacgcaagcgaatatactaagtagctatatagtcttttagggaaccccgatagagtagtatatctagttaataacccccgccgattctaaaacgtgtcggaccgaaccgtagaaagaactagatcctatataaattagagaacttaattaactttctaatatagtgggctaaaatggaatacgggtaagtactaaatagcgaaggccgatctagaattaagtggtcgatagatttgtattataccgaagtttagggatacttcaactaagttatagatatcttaactagccgacctaaggtaatctataggtcttatttaactttattagactacccgtaatataataaatataggataagtgctataggaaaatattagagatctaaggcttatcgatatagctagaaaagatcttactattagatactcgtaataaactctatttagaaggccttcctaagagctttatctaattataagaaatttactaccttatagcttaaagaaaggttgctaaagataatagcctatttacaattgcctttttagactattaagaatcctaagttcctagtactacttaatttaatttactctaacctaggagaattagaaatccctttaataaagactctacgacgttgcttatataactctattatagcctaatagaagtcttagttatataacttacccgaagatacgaaagtttctcttatattagattattagactagccctttttagtaagtatttatagcgattatagtatactttatcaataaagattagaactatcgtgaaatacttcttaggtttaagcctttatacagaacttatagtagcgttaatctaaacgaagtacttctttagttacttaaggatagataacttctagattatatctttagtataactatagataatataataaataataagactcttatctaggccttataggagttacttttattaggcggtactattaatataagagaatttattatacgcgtactatatatagcttatatgatttagctttacctaaagtaactactaggttatattaaagctgctctaaagaataaagaagtaagaaggttttagtctaatacttaagctatctatctaagagattctttagagtatagtaatatagcgtatactctcgtaaaggtatatttaacctagaaaaaaaagactataggaacttttattaatatttttcttttaatagattcggttatttactgtctttataaatataagcttataataaagagacacctttttatatctttaatcgggtaggactcggcttttcctcttctataatatatagacccactagaactctacttttttaatactttaaagagcgcgctggcttaggaatactattaataaatactaccgagactataaatatagctaatttaaagttatagatactaagtagtagtaaattgactatatagttaatctaataaggccgttctttaaatttactatagctctaataaagactaaagatataactatctatagtatctttcttatatataagaagcttctagaatatatcgaacgcttaaaccggaagctaagaaagaaaataataccctagaaaaaagatatatacggtactatacttatagtaaagtaaaagttaaaagattattacgagaagacttattataactatagatttctctatagtatagtggctttacttactccttagtataagctttaataaagactaaagatgtaactatctatagtatctttcttatatataagaagcttctagaatatatcgaacgcttaaaccggaagctaagaaagaaaataataccctagaaaaaagatatatacggtactatacttatagtaaagtaaaagttaaaagattattacgagaagacttattataactatagatttctctatagtatagcggctttacttacttcttagtataagctttatacttttgataatatagagtattcgtagtatattagcaagactttaaaaagatattataaatatctacgattatcttttatatagtattaataaagaaacctagagatactattctatactatatagcgccctttattataagccttagagttagaacggcttcttaaactattatatatagtagaaataagcgaaggagtcaggtataacgaggttaatcgttatctctacaagtataagtatacctagcttacttaatctaaaagaccgctaataatcttagcgactaccttaatactaccgcgtatatattaaagagagaataagagtaaattccctatactttcgcgactagctcgtgatttactctcagttctagctactagtataggagttaaaaggctatttaatagtacctaggatatttactattatcgccaaggatctctaaataaaactataatataagacttgataatatatatatactctaagaaatttaccttagagagctagtaatcgaatctattagattataggacagcggaaggggaggattaggaaaatctcgaagaatataagataaataaggagaataaagacgaagatatagctattagtaatatagacgagagcgaattagccgaagatacctatataagtcctactacttagagtactctaggatttgaaagtattaccttataggaacttctgtctcttaatcgaccgtaagatacaacgataaccgctattcgtctagacctagagagcgacgataaagatctattactacctctagttatatatctagaagagagatcttaaaaaagattattaggaaggatgataatacctttaagccggcttaaaggctataagctatattagtttatctgctatagagctataatttgatataatctccttataaaaacacttatcctaaactataaacttttaaaactaggctatgattctactatagttaaggcttttctgaaaagcggtagtagcatatagtctacttaatagtacctttaagccggcttaaaggctataagctatattagtttatctgctatagagctataatttgatataatctccttataaaaacacttatcctaaactataaacttttaaaactaggctatgattctactatagttaaggcttttctgaaaagcggtagtagtatatagtctacttataccgggataatacgttaatctaaataaataattttgtataattttgtgctagctaataaatccttctcttttaggagttataggtaatttaggtacctgtataggtcgcgggttgggttttcaaaaaataaacccacctacgggtctgctgactaagacctgccccgacctatggggcgggttttcgtgggcggattcgggttttggggcgggtttggcgaggtctagctatacctccaaactctttcttcttgattgggagaaaccaatcccgacgcgcgcttggctgggtgaggccaccgccttagaattctggcaaaactgtcattgtaatgtttgtttggtcagtaataagttatcgtcatagtactgtatattatatagaaccacttggaatcgcttggtggatcttatgatcttactagatcgctagctagcttcctatctcccgtttgctatattatatctgcttccacctattctttctatatatagcgaacggtagtctttgctcgctagtcatagtgtaatagcctctacttaccttatagaggaactaaacctggctagaaaagatgttttcgtctatcttataagttctactatctagtacacttcttgtttataactaacgttaatcctaatctagttctcctatctaaactttttaataaggatcgtgatcattataagagataaagtaatctcgcctcgataatataacccggttaacgggccacgaattataggaagactactcgtattatatcctaacgcctaactattatagcagccccttcgtagtactatcggacctaaacccttccttatctagtgtagttgagaatagcttagacttatcgagaacactaccctcactcaacctcaaaactttctagttatataagtaggaatacaggagagcctataacgtagacctactaacatatatctactactagatagagtaacgagtaactgttaataataagagatactatatctataacagtattataaaatagttaggtatagataagaagagcaagctactaagtaaggatagtaggctactcgagcaatagtataataataactttatatagatagagaaagggggaaagtacttagtcctacttacctaagcgaaaagataccgagctatgatatagctaggctcaaatttcgaagtatatatatatattatcgataggaaataccgacgatataatgatatcttaataactacctacgatactggtagaataaggtagcctagagaccatagcttattatcgaaatcacttttaccgaaaactagtactagtataaaaagcggtatatttataaatagcgatcattactaataacagataattactactgctattgtggtcaggggttgggtttttctggcgtacccggactcatgaaggctttggtcgtttgagctgtccttacatttgaaaggacataaaatgatgtgataaatccgaaaacttgtctttacagtctgaacagcttcctagtaaccatcgataatttgcaacgctgattgattgatgataataggctataacgtcattaataaacatgttcagcgtgctgaaaggggtccttcgaaagcacatatggttggttttccatgaaagaaaggaagtactactgcatcaaataaacaggcttagaatggttgcgttcacttgataatagcgctattaacccataacaccaatgtgacgttaccatatcaagcctcgataagctagtactattcgagatatagctagtaagccgtatactaagttcttataaaacactctactattaagaaggggggtaggggggttgtagacaacgtcataaaaacatcaactttcggaaatgctaaacttaatatctaaagaacataagtatatatcatatattaagcttacggcttactatctagagatcttatatttaaactacctatcgcaattattataataaccgacaatcagaaaaccttcactctttctaacggcgcttagattcctactattagtctcagaacctagtaagacaaggaggcctaagaagtagtagtccttaccgctctttacgtaggttatcgctatattaatatagtaagatagtagccctctcccttaataacttaatatagataataaggctaacttctatagctatagcactgagcctactattagtaaagctataaagtaaagtggcattcctcgagaggaaatttttgttaccagtaagctctagaacaataagcatcatcctaaggatcttaactaagcagtataacttttattaaatgatctaggtctagaatatctcgacctattcttaatatattagcctattacttttaagcgtagagataatcctttcccgtccaataaagataggaagctaatcactgataatattgactatctcgatataagccttattggatagtagcctcgagaatacctactaactagttaaagatatatagagctatagaaggccttattaaatccggtaaagctaaggctatcagaatttctaacttttcctaaaaggaagttgaacgtattcttaataacgtggcgattaaaccggccgtatactagatagagctctacccttagcttcaataaaagatattctacgacttctatcggaagaatagtatttatataacgtagtattcactatttagaaactaaaatgaaatttacggttctcgcgaggaatatagttagctagtgaatgatcagaccttagtagaaatcggaaagaagtacagaaagaccttaaactaagtcgctttaggtatatgtactacttataccgagataatgtttctctaactaactaacccttttagcctagggtattatatatagccgttccgttatccctaaatcaaagttagctgagcgaattaaacagaactttgatattactttcgagttagagcctatagatattaaaaatattaatacaatcgataagaagctccgtttcaacgacccaagtaaagactttagctacgaactatattcaggccttaataggaagaagaaataaggagaatttcgattaacctttatcaggatactagagtccggtaagtacctgatcttaggaaaagagatatagcggcgtcgtcgacctagggattcaatcatcatatataggtataatctcggcctttccccaatcaatacactataaagtagtctaaaaagctaatgggaatcttaaaataataagattgatttcagtgggtatcataaaaatgtaatccgaaagaattacctaagcttattacggagaacttagttcgctattacagtcgttgaatctcctagctataaatcgaccttcatatattcattgcctacgacatttcttctaatataatagaaggtaaacctatggccttggcgggaatcccttagaccaatagagaggccgagattgacagcgatgtttattgattgttgctttgttatattgatgttaaagctatatatatggattgagggggacaccaggtagcaaacgtatagcactttcccgtaaaaatacatctagtcatgtcttaatactgtactgtaagatacgcctatcagccttggaaagcggtctgaaaggcggagccttcgctttctatccaatcagaactcacgaccctgggatttattttccaggaaccaagtcacaagagtgcagaggtatagctgatttcgaataatactataacgtgtacctcttatatcaataccattaatttagcctcgtcattgtagaatcgcacggcagaagggtagattgtattgttactcttgacaccatcctatctcatagcatatgtatgttaaatctctatcacagttgagtttaggtaagcttatccccttataactttgagtaaggatatttgcaacttaacagtggcaagcctagtaaaagacacgttatcgtttgggtggacatatcatttgagtggttgaccctggggtgcgacggtctgtaatttatggtaataaatgtaaaacccggttatcgggttctacgcggaattttatctgttgagcccaagggagagctcttctatttgccgtaagccagatttgattctgtattcagtgatcgatcgatacctacctacataaatcctcaccgtcggcatatatatacagatgggggcgctcgcgcggccgtggatcacgttaatatactacccctcaaatcgacagtaagatctgcagaaaaggaacttcgtacggactattacgcttagagtgggagctttctagagaagaaagagtgcgtagagttgaaattatttcgaatatcactgcaataagcgttctgcctagtaagctctatcaaggacgaagttttattagtgcgtctgaggaacatttagtgctctcaatctgcctgaccttgaccctgattcgtaagggccttggctgccttgctcggtatagacttccccactctgtatccatcttaagtatctctgatttgcctttataataggcttcatccctttgcatattcgtcatgtcatcgagaaattactttagcaagtttgcaatgactagacacgcatggcggatgtaggagctgccgaagatataaccggggctagaaccgatgttgagatacttgctgtggtggcaccacaagccaagctgtaagaagacaccgtcgttaaaacagacgctacttcgtgattagcattatgtgaaagatttctcttccaacatacccagttcaattgcagccgcattagtctcaccggccatagtggggcatgagcaatgaatatagtgagtataatgatttgctatagtgtcgaagcaatctatacaggcagctcctccgctttgtattcaataaagttaatgagctagcctttcgacgtaagacgatatgcagggggaatgatctggaacccacccattctggaacaataggcttccatcatcatttcgaagacaatcactctgcttcagcgacgagatgtagacagctccatcatcgaaattcgggcacttataggtgaaagtgcgagaatccgaggcaaaatcataccaacattggtcggccaaggccaatggcagaatgaacaacgcgaaactaagaatggtaatttgcatatcgaagagctggatggagcgagataataaaaaaaaatgggcgtttctgctttatatgagactttgtatttatgtcgtgtctggctcacctattataatagatgttctggtccattttactgtttcgtgaatctgtttgcttctccagaagagttgtcccataatatgtacgtaatgggggattgtttttctatacatgtttgcggggtttggaggctccccgtgtttctcctccatagtacatgtgaaggtgatacaatacgtgtaagttcatagagaaagcactgtatgtattctggtggacgaagaggagaaagagaggacgagagagcaggcaaactatctgggttctatttacatgtgatgccttaggcatccgggcatccaacagaaggtccactataacgtaattagtatctaaccaagactgccatcacgtcgttaaaatttacgtcataggcgatcacttcatgaagccattcgggagagctatcggtaagtccggcatgaaaaagttcaaaccaaagtttctggttgtcgaaattggcaagtaatttcagcaattccgctgcgtctggatcttccttttctaggcgagagtaatctgggcatctaacatccccctcatagaatcctgcatgtactccctatcaagatctccagttccggcatatatagtaaaactctgcaaatttcttgtggatttagcatatgccaattagcttagtaaagatcttgaattgatcctttgcaagagccttggtaaatccatctgcagtatttcgcttggtgttcactcgatgaatctcaacatgtccttgcgccactgtatctttgataaagaagtaacgaagattaagctatctattcgccgatttgcctcctttcttcgagagaagtaattgtaagttgatgttatcagtatagatctctataggacactgctctgggagcataaatgatcgtgcgatcttgtttaaccacattacattacaactaggttgatctagtgtataccacttagcaactgtcatcaaattggctgtgatcgtctgcttctttgtagaccacataataggtgatccagtaaggtactagacatttccttctatcgatttgctatcttcctagtctatatatgaagtatctgtatatatatagaagcgaagttcactggttcgaccaaggataattccaatatcaggttttcgtctcagatactttataatatattacattactttatagttagaaagggtgggatttgctagtcaatgctataagtgtatcactgcgaagcgaatgtctggtcgtatcttaactgctaactagtttaacatccctacaatagactgatattaatcaaaagtatcgttatctagtatattggttatatcggctagtatctctctctatatagctggcaatggcatatctttttagctagaggttttagccatatatagtaccttttacatatacactttctgtgatatagtgattgtcctattagcatagtctctgtcgagcgtatagtttaaatactactttagcttaccaaggtcctttaagtcgtagtactaacgaagttcgctaataacttactcaatatcatcgtcggatggtatagcaataatgaaattattaatatagattattataatagttaaatttatacctttacctttgatataaacgtaaggattatcatccagcggacgaaagctaatctaatatagtttacagtctatctctttattctataggaaagcagagtcttacaatctaaagagcgcttgattaagtgtatatacccagtatttcttatctccttatatatctgtgtactcaaaacctataggttatcttatatagactgtctctacatcttcatataaagtattgagatatacagcagtaaagttaacttgcctccattttagactatatactacaattagtgtaagaacgattttaatcatacattcggcgacaatagggacatatatttctccatcatttttatcttagaaattgccacataccacctattgtactttgaaatcgtagactttatctctggtattagatttgatagtgaatttctattatcctggtagtaccttagcttttaatagcttaaggattaagctctatatgcctttagccttaagatcactaagttatctttatatagcctcttgccattaaggctagaaagggctcttttacacttacttatatatagatagcaagttaatgtcctttatatatagcggctttctattatagagaaatggtttgttaatatcgactttatctattattatattagctattacagacatcgcactaggtcctatagacccctatccatcaccctccgttacattattaccacccgagtcctttgcctttgcccttatggcagctcattaaatatcttagtctcgtttctcatactcgatagtgaggtatttctgctttagatcgtggtatcggtcaggtataatcccaatattcgcttatctcaatcggcggggtagggtaagagccggtatagctaggtcctaagagataggatctagcgataacttaattaagataatcttatagcttagtaatatctctgatcttatagtaaccggtgtgttcttagtgcttatcgttatctccgttatatcgatagcctatatgatcttacgacttagtaatatactgatttatcgagcgggtatagcctatatagtcttacgacttagtaacacactggcttaaggaactggtagagcttatgtgatcttacgacttagtgatatactagcttattaaacgggagaagcttattgagtaggagatgagaaagggtattagtaatctattctctatcgctctagagaaggagttatatcttctaattcctcagtaatagctctcttaatattatcggtatctcgacgaatattatctatacttttagtaagttaagatacttaggttaatagttattaaagtcttcttctgagatcttctttcttccactcaatatctaaaacctataagacactcttagtggtaggatctatgatctcagtgattcttacgcctattatcataggctcctctcccacagttaggagaaaactttaaaagagtttgcactattttattagtagaataattattctctatggtagtgccttctatggtatctcaggcattatagatacactactataaattattagaagataaattatagatagcgtaacaggtacttatataactaattgtataggagtttatatctatagtatacgtactacttactactacttcttttctggcttcaagatcttatcttcttgcgatagtaaaataggtatgaatctaataatattattattattatcaggatccttaggattagtaggtactttactagctagtattagtcctatactatcgttatctctaggttatagaaaactaatatcacaagatactactagtttctttgtgactagatcctacactttataaacatgactaccgtcccccttatagctaataagcatacctttctatactctgggtactactttcctagcctatgtcctcttaggcttcggaatatggatatatacagctgatccctatggtctaaggtgctttaaggaaggctctaggtttataatttcaaattcttaacgccaatgtataagcggcgagatcttagtctttagattaactagtctattatagatatagatggctatatctgttatatacggccacatctcttccagtatcttcgtatcgatgattatcgttctctatatatcattgatatatctaccgaaacgttctactgtactatttagctctgtggtataaggtagtatagtcttaaaagtcatactatacttcttaccctatttgatgaactctttaaactctatactgccatctattcgccagatacctaggtatctgccggtaagtaatttgatcttcttacagaatatagtaagcttatggtaagtatcacttttattctttagtataattccctcaattaatcgagtagtattattaacgactagtagctagtagttctctccatttagcctagtaggttttattagctatatattaatatagaatttctatactatatcttataccctcgcctattattaacgggatatcttaagctttaacttaccttaaaaataggtatcataatcgaagtattccgtgctatactacttatcatcacctaattatttagtatattatagtatggaagtaatgcaagcttttccagtatatccgagacgtctgtggatcttatacgtagtcactttgttcacaaatccaatctcattgttatcgttagaatctatatccgatttaatcttattagggttattatcgtcctttagactaataaggtataggatacctattaatatatctatataccctaggatatctccccttctatttatgagattcttagtatatatatcgtaagagatatcttattctttaagaagcttttgtatactaaatagcttactatatcccctaggagtatagtaaccagttattataaacgagtacatctttctatctaaacctagtagggcagcccttataatgactttactatagcctagtataacgactctattaccagagtaatccttatatatataagctgtattagggtaatccagttagtatgtgtggaagtccttaagatcgtatattaatatcttattagaactagtatctagtaaccaatcattcttcctattaatagaattggcagctataataactatattattctgtctatcttaatattaagttctctagatagcctttaaataggcccacaagttaccggacggttcctacgaggctagtaggttatcactaagataggcacatctctttacagtatatagtctaaagccgtagaataaatacatattattgtcatccttttatatgctattacgcatctcttttatatagtcataaatatctttactatcggtaggctgcttacaaagacctctcttcttcttctttttagtagtagctatatcttcgtcgatagcattaatatctttactggattaggtattattatctttattataaccattattatgactacctcggctactacggtttcctctacaaccacctcttccattacctcagccacagccggtattgttattatagacagtattagtaataccttctatattagtagctgcttagagtgctctctagtactcctccaccttattgagattaagtttcttaggtttaagacttacaacttcttccctaataaactagacctttttgacttctaatttaaggttttaaaggacttatgataggccgtgtactaggtacagtgctaccttaaatcgagtaagcatatggtactgtcactagtactccttaatgtactcgcttactaagttataatccaatcgtttcatcttatcgaacttccttatcttaaggaatacagtttacatctagtcactgccttatattatagctataagcttatcgtataattaatcagtgtacttaggtatctttaacaaattgtacagcttattctatagtataacatcgatttgattgtatatctagcttataactaagtgagaccagtacttctatcttttaaacgaagcatgcgacttaggaggtcagggaatatcgctttctagtagctattctaaagtatatgggatcaactggtaagctagtgcttgtttccaaccacttagattagtgtcattatgctccagtgtccttactttctgaattttagtcattgcaatcgttagcagaccatgtccctgataggacggcttattatcctcatcctcgctattactggcatcctgcgcaaattagatcggatcgttcaaggacaggacttcattgggatcaattgtgttaggcggtacgccgggaagggaggtttgtgggttggtatcccccacatttccggtcgcgacgtctgccatgattggattgtaaagctaaacggagcttttaccggtagggctcgaaggatttcctggatgttattggctggatccgaatctgtgtagtatactacgtacaaaggtggatccactgtggggtcagatcgtcaaaagtctccagatgaaaatagcttcagagaaaagagttgctagtggtccaactagcaaaagaggctcataacctgatacaatacgtgtaagttcatagagaaagcactgtatgtattctggtggacgaagaggagaaagagaggacgagagagcaggcaaactatctgggttctatttacatgtgatgccttaggcatccgggcatccaacaaaagaattctagagaaaggtcatggtatggagaagactatgtgctagcttcctggcacccttgtagggcttcaggagtttccagttgacgtatttgaccgttctaacttctgagaacattactggggaacatgtatatattccccaagaaaaagtgaaagtatgtctatcaaatattcgtacgtccccgtcgcaaatcttcctcattcgggcaaagatcagaatcattttctcaaagattggccagatacaaacaccgcgaaggattccgaaaagacatttacttttcagacaaggcggtagctattttcatgagatgcgggacggcgagttaccattcccgcgtcgaatacgccgctagaagtcttggatcgaggtcttatatctacattcgccatttgaaaactgcagtgcaacatgtttgttcattctccaaagatttcgatgtacggatcatggaacattggccatttattctagctcatttatgataaacagtatctttatcattcattgttctttcatcgatcgcatcgccgatgcagaaacaccacacaatacagacattcacctgaatgaattcaattcatcatcgcacaatgaacaaccgacatcgaagctccccaacgtcaaaacaaacccctccacattttctgtattccgatgacgcatgggcttgttacagaccaaaagtaagaattcattggaaataagacttcttcgggtcatcatcgaatcattgacccctagtaagttgttcgtcggtttcacttagtgaaaaacatgctgctcaatgccatgcagactttgtacgaacagaaaaaagcctctttgaacgatagacgttcggtccactagatctcaccacaaatcaactgtatctgtcagctggtgattgagatacggccgagctagagttcagtacatttcttcttttgtcgaagtcaccatatatttcaagccaacaatcgcggtctctacagtcgtctttttctccgcttgtaaaattcatgtgacagggaggcttgtgcgcatccatagccccagaaggaaaatcgatccaaggctataatgttcatgttagtaagtcaggtattaaggacgtatcttccagtggcacgggtgaatagaaagacaaactttaggaaccggccagtcagagaagtggacagtcttggcttctttgaaaactgttacaggattccaagtctcgcttgagtctccaagatacttagtatgtgattcactgcggaactctcctgacaacaaggtgtaagggcggtgcgggatgatgagcgcatgatctttgtatatggtattcacgatttccatatcgtagtctgatcctcctgaggttttgatagcctccaatatacggtcgaatgcgagatgagacggttggatcagcataagataggtggtcatgacacgatgatcgggatctaaccagtaagcccggggtatagcgacagggcacggaggtagaaaaaataattcgtccatatgctaaatacccaatattagagatataaatggctagaatattatatgaggtagaaacggtacttgcaacatagtgatatccgagtctaagctcagaacacgatcatactgtgtctgattgaaagccaggagtttggtaaaactctccgaccatgtcgctagactgtagtcagcttatcgattctcgaagcatgaaaagtgaatttgacatgcgatcggcctcgtttctagtctgcacttcgactggtaatagtttgacctggtattcatcgcgcgctttacgcagcaaccggctttgcgtcccgtgatccttctcatcaactgagaaatgtaacggatacattaggaaacgatcagccttgctcttgaggcgatgtagagtttcgaaaatcatgaccgaattgcataaataagcttcactggtagcatactgcgaatatgcaaaccttgaccagtccacggcagtttcagctttccagtgagagggaacttcgtgatgtggcggtctcgtctccgtgttccttttcgggaaaatgcttcgtgttggaacaaaagcgaggaagagaattgcgatgatgcctatggttcgtaaggtcgcgcgacattttctcgacatgattgtcttcctagagggataaaatggggactcaaattgagagttcagataaatgaaattggtactaggcaactattacctaacgaagtgtgtatgaggtcatagtaaccactagtttttcaacaatgaaaagataaacggctggatgtgggatggaatcaaataagaactttgaacaagctgcagagtgcagaagcgggcggcctctgtaacaaccatgtatcgatgaaaagtccaattgacgaaattcgcttgacgagtatgtccgagggttgaaatttgaggtttcttaaagttttttctgttcatgttagaaacgtatattccaatttggaaatttaaaaattaaacggagtttataatcttagtcattttataccaataccctagaatgatcatgtttatacatactgtcaacctcccttcagtgctcttgatttgttttttgacggttaggaaagaagaagtcttacaaaacagatcgacaacggtggtgttttgttcattgaagtcgcgtgattcaaaacaaaatctgtgacagccaaggagtaatatacgcgaggagtaatatacgagtttacagactctcaccacagccgggtgcgcaagagcgaaatttggaactgaagctctattggctgtttagattgtctgctcagtggtccatgatctcgattagagtgtctccagtagccatctcaacgcgctggtgatgacaatgaatctatttggtctatatatctatctcgctttgaatacgtgctaccatatgtaaattttgttgagcctgtcgaaatcggaacgtggttgatagatcactggacggcttttgatgatgcttgcgtttaagacaaaatttacgacagacaacaaaagagcgctttccaaccttcaggctggactgggaaaatagagtctgacgcagcaaccaactgaagaattctcagcctataccaccgagcagatcaatctgcaagttgatacgaccataaagattggggtagggcatcagggcaagggccctccacactgtatcacatgagaaggcagcttcagggaactaaggatctccgaacatctcgaagttttgctgatttctcccgtatcagtttgattggccgccagaatggacaatagcgattcaccgtactggatctcggttcaatagttggatcggcgtgaggtgaatcaaatctacgggtttgcgacatatcaaaatttcctatttacccaaaatatcaaaagaaaggatttttcccagccctcatgattagactgaacgaaacagtcaaaagagaaatactgactactgaaacaaaagtagagcgtttcaacggctattgctacctcctgttgtgctttatattcctttgtattttcagccttcgaacaaaacactcaattttagctcagcaatagactttttgagtagccttctaaagatatctatacccgataaggaacaaagtggtacactatatcctgaatagatcaccaaattgtagatatctcaacgttctttttactcacgccacaaaacctccttccgggatggtgaatgaacttcacgggcaatgttatcaagactctttaccacgtgctcgatatcgtctttagatgtttctggattgatcgtacacattcgtaagcagacaagattgtctaggtgagatgtgaaaataacggccacatccctagaagcaatttccttggagatggcctcgttgagctggttaagagtcgcgaggtctactccttgaggagcgtatcggaagtttaggatcgcgagagagctcggcgaaatgatctcccagtcatccaaggtactgatcatacactctagatgccgcgacagctcgaagccatgacaaatcatctgatcgaacttttgaagacctagtacttgtaatgtaaaccacagtctcatatggcgtgcgggacgggtcaattccacgccatagttccacgggtcgggaagttcttcttggcattccacgtcccgtacataatcaccggtcgaggaaaaactttccaatgactgagattggtcacgaaagaagacggcgccgcagccatgagtttgaaataaccatttatgagcatcccaggcgacgctatccgcgaagcagatgtccttcacctttgatcggtgagtctcagaaaacgcgaccgagccaccgtaggctgcatctatatgcagccacatcctccgaccttgcgctatacgcgcgaggtcttctagggcatcaatacttccagtattggtggtaccacagcttgccacaagtaggaatggttttcgatgattttgaaggtcttcatcgatggttttctccagcagtgaaagattcattcggaacttggaatcagtcttgatttcacgaatctgatgatccgggataccaatgatacgaagggcctttcgaacgcagaaatgagtttgctcggagatataagcaaccccgttcgaacgctcttcgactctaagggtttggtctcgcgcaacaaccatcgcagtgagattggccatagaggcaccggaaacgaactgcccgcccgctgacgatggtagcccaaatatttgtgcgatccatttgatcaggccggtctcaatagtacacacccctgcgctggcctcccagcttccgccgaagggattgtgggctgtggtcagacaatcgccaagcttggaaagcggcgatgctggggacggaatacaggagaagaatcgtggatggctgacggcgatccggaaggaaaagatctcatgggcgtccttgatcacttcttcaattggtctggaagcaccaggaacagccaacttcagcaagtcaataaattcccctggatcaggccggcggatgagtgttgtctccgaggcagctgtattgattcgggttagtagtgagctatacgtatgcttgtttagatcggaagccattgttctttttcagataatcactaagaagtgtttctctggattgtgggactttcttttgtaatcttgaacggaggaaaaccaagcagcgaatattgtttaacttggacggttacatttcttgtcggttcctctgttatcttatataagtagggtgagatgacaagtaaatagcgtaatccgacatatcctattaccccaatgaccgagcttggccggttaaaatgcgcactaaaaacgttcgcgatgaatcgcaatcatcatttgatacataagaatagttttctactataactaggactctcatgtcaagttcggtcaattagtgttctcttggtacataaggccgatttaatttagattttaagcatctagccacaacctgaaaaattccccaagtcagctggataattatatgtcatgaatgagtgaggcataccgtggcaatcaaactgtcatcgccttgtttgtcaccgctgagctcccaccacatacccccaccaaggccgttggacttgatgtactcacccttcttacgcgcaatctcggtggtatcataactgatgaataaccgtgattttgagttataacagtagctagcagctgcctcatcgaggttggttaccgcacagcagggctggggcagagccttataatcccaaacaccattctcccagctaccagctcctacgccattgtaagcttggccaggaccattggtgtcactgaaagcccggccgtacagaggcatacccatgacaatcttgtgcgaggccactccgtgcgagatgtaataattgattgcttggtccgtgttgaagggagtgcttcctgggttgtcgttggatgggtggaggttggcattgtgtccagcaacggtgtcccagcttcctgcataatcataggccatcaggttccagaaatcgagatactgatccatccgagcgagatgctctttgtggtaattggcggggcctagaatccgggttagctggcttatttgagtcatttcagaggaatgcacgtaccagcaggcgatgcagcggtgagcaagaaatgatagccgtcattattagttgaactgtataaatcaagcgcctgaaagacttagcagagccggcaaaatataagcgaaaacttgcctcgcgaagacgccttagtatatctataaattggcccgcttctttatcattagcagggtactatccagtatcagcatcaaacagcgagagacaagggactatactcacttcaaaatctacatcaataccgtcaaaacccaaattcttcagcagctcgatagagctattagcaaaattctggcgtccttcctcggtctcaaatgattttttgaggttggaagaataggtccagcctccaatcgataaaagaaccttaaggttgcgattcttcttcttgagtagaaaaagttgcttaacacagccatagacattgcttccgctatcagtccaggaatcagtggagtagtgtttgtcagtgtccgaccaatcatccgacataatcacctcgccggagtcctgggcattggcaaatgcgtagagaacatgggtcagtcgctcggcggggatatcttgagggtggaaatcacgggcatagattccctagccatgtttgtttagttgttttgatccagtgatggcgtattcaaatgacacgtacccagttcacaaagtaggctacggaacgatacccgttactatcacgagtagcaatgtcagttgaatcgatcttagttgacagcagactgtaggcagtattcgctagtcgcgctaggcaaaccaaaaaaagaacaacaaagtgcatgatggtggattttcaacactatatcggatgagacgagtcggtacaaaaagcgccacggaaagggcgagtcgtgttttaaatggctttgaggcaatgagaaacaaggtcagctatactcgaggccgacaaacaactctacaatgtattcctaagcgtgcccaacttggtaatacaaatcaatacttgaaagcggcggcattgaccctcaggaatgctcgacaacggtcaggccagggattcgtctgccaactatacaggttatgaaaaggctacggagaaatggaactcataccaaaattcggtggattccaacgagcgacgacaataaactgcggggtctggctaaagaacaggccagagccgcgacaaaagaagatgctctcccgcaagaacgtgtgccaagaatgaagccaacaacactgaatatagcacggctccaaggaatctctagcgacaagttgccggtgaacgcagggagacacgcaaaacaagttgatgcagcactcctaggcaaacacacccggcagctgtatgaccgattatcatagaaggaagcgaatgtgctggctcaactccgaaccggcatggcaggaatcaatggatatctccatcaaattaacgtggcagacacggaccagcgtgcgtgtggacaagctagagagaccgtggagcatttcctatctcgatgtcaaaaatggacggctcactggacggaattcctgtaacgtaccaacacctaccgaggaaatatatccttcttcctagaaggaaagtcgccttttaagattctgcaaaattgtgtagagcctgaaagattgacgtcgtagaaaccaagaatgagtggcagtcggttatgttgatatggtgatgtagagtgggaagtcctacaaaggatttcaacagtctatcccggctccttattgggtcattcgaccgttcgatgcacaaatagttggaggatcgttggaggggtcatcggcaactatcgtatcgttctctattatggatgtttcacgacgtatgctgttatacacaaaaagcaaaaagctgtgatttctctcttccgttcctaggagctcgattggctctcccaggaggtagcaatcactggcatcgataaggaggcaaaacaattgggggtatcgtataggccctgacagaactacttatttaagccgtcctatatccatcatttccttccttacctttccggcactcgcagtcccaccttcgaactttacttctcaagtcttttacaatttgtcgacacaatgatggtataatcctcctttctattcgaagatcttcttacaactaacgactgacacaatgatgcctagacaagcaatatgggtattccagctaagttcgagcttcgtgactcctccaatcaagcagctctttggcatgccgtctcgagatgcaatgtggcagaggtgaagctgctgctgaagagcggagacgcactcccggcggatctcaatggagtcacgccgctcaactgcgcaattatgcgaaacaacacctcgatagcacggctcctgttaaagcatctgagggcattttactccacgacaacattcctggacgataaagatgtcaacggtgccgagctgccactgtgtctggccgtttccttcgagcgcacgcagatgatagagctgctactcgaatttggtgcggatgtcaatgcggcgaatcggcgcggacacactccattatatcatgcggtagatcagggccgtttggaggccgtagaattgcttcttaaacagcaagacaccaatctgcaggcaccggatcattcagggtctactgctcttcacgtcgctacaaagcggaaccacaagtctatcgtgaatttgcttttagccaacccgaatgtcgatatcaactgcagagatggccacgggaacacacccctctggtggtctactcggctgaagcaagatgacatctccatccgactgctagctgaggatggtgtggatctcaatgctgtcggatggaagagcggttctacaacacctctgtatcatgcagtggaaaggcagaattatttggttgcggaacgatttgtcaaaaatccagagttggatccaaacgtcctcgggtctttccgttggacacctctcggtcacgccgcacgcgacggcaatgttgacatggttaaattactgcttcgaagaaacgatatccaaatcaatgcagtccgcccgggtgaggattccccactttggcttgctgtgaagtgtggtagaaccaaggtggttggtctcctactgcagcagggcaaacgattggacatcaactctcgaaacaacaaagatggccaaagcgccctgtcagcggccgctggctccggatatctacacatcgtgaagctcatcttggaggactcccgaacagacctcaatgctgtggacaagtcgggcaagagtgcaatgtggcacgctgattccaacgggcatcatcaagtcgtcaaggagctcctgaaggacccaaggctttgcgtcgatctgagacctattgcttcggtggcgggcagtcagtagatgctccgagttcgtcaagcgatatgggggaaggggatagccggatctgctttgaccagaaacgaactgcatgtcaatatttgtgcaatgcttcgactgtgtggttaggcttttgatggccctcggcttcatgtagccgacacaatttggccttgtccagctctctcaacattctttgccctggttggtggtcatggggtcattgatcggttggtccggcaccactgagtggttgaaccatcgttcatgttcaatctgctctctttggggatcaccgttgaaatccgtccatccccactctaatccgttaacccgtccatccgtttgaagtctaaccgttcggtggacttcgacagatgatgctccacgaaccatcgaccgatcttcacggatattacgtctctaaaacgacttctttccagaggaaatagtcagtcaataaaaacgtagctgattgtggtcgctaagggtggttgggggatcgttggaggggtcatctgcagctatcctatcgctttctattgtggaagattcatgacgtatgctgttagtagatgctccgagttcgtcaagcgatatggggaagaaaataactggatctgctttggctaagaacgagctgcatgtgaatagttgtgtaatgtttcaattgtgcggttaggcctttgatggccctctgctttatgtaggcagaccaatagccaaatcttatctcgtacatatagccgacacaatttggccgtgtccagctctctaaacaatctttgctctggtaggtggttataggatcactagtcgttggtccagcaccaccgagtggttgaaccatcgttcatattcaatctggaggccattagccagtagtatatagttaaagtcgtagtgccaagggctgctctgtttagggatcaccgttgaaatcctttcatccccactaatccgttagtccgttaatccgttatagtaatccgtttgaagtctaaccgttcggtggacttcgatagataatacttaacgaaccatcgaccggtcttcacggatattacgtctctaaaacgacttctttccagaggaaatagttagtcgttaaaacgtagctaattagtctcgtatatttatccgcattaaaagaaaaataatagctttcaaaagcaacgaaatgcgcgccgcgataagaaagtaatatcgagaggcgctatctatatatatccgtacctttttcccgtcttaggtatcctataaagaagaggaactgacgaatttcagataatcgacttagccttaatattatacccagctaagttcgcctttagctactagtcgaggatagatacgcctagttagtaatagaatctaagaaattattattacagtcgagcctaagtaataggaccgtcggtctgcttcgagctatatataaagaattgggccggtcgctcgaagtagttatactatagaccttatacgattctgacttagggcgggacgataatctaggggaggatataagatatcctctacctactagatttcccggtactaaataaggatataggaagatataagcgcgtataaggaagaagacgggttatttataataaaaatccgctaactagaaggcgcgaaccgcgagctaggggttaagctcgatagtactcgggcccggctagacgacgcgtatagtaaaagcgatcggttctagaaaaagtctcgtcggcttcgggctgagcttgaagctagcttactccgaaccagtcggctggagactaaattaacgcgtgttagagcgggagtcaccgaggcgataaaggctttacaaagccataggaaccagaatagtagctcgccggcggaagaacgcgatcggaattgatgtcaggaaagatctcgcgaagtggcaccgtaatccttgaggagaggttctggtagactgtgtcaacaaaagagggtcacaattctactagtgcgcccgaggtataattattcagcacccccctctgcctcatcccctatttattctgcactttctatagtatataaaaaagacactctcaagtactcaattggctatacccatactagtctgtactgtaacgaccacgttccgacagactaacttactaacacattggtttgtttatgttctataagcacatgagatgcgaccattcgtagaaattcccacttattttatcgagcctacttatcttaacctcgacaagcaggagtgggtggatcctaggttgaacccctataataggaatctcatattgtttatagtgaaaacgcggctataccctaaccaccacgcgtttttacacatcgataagctactatagataatatataaatctcctaggaaggaccagccgtaaatgagctgcgctagaaatgacaagtatgcgtttggtttctgggcagaaaagtatagagagacgatcatagatatatatatatatatatacttcggattaagagaagggtttcgcccaataacgctaagccgtagggggtgacttaaccaataccttataacccctaaaaaccaagccgaaagaaacctcgtagggaagttacgctagtaactaagttaagcgatattagaaagtatattagaggtctctacgtagacaatcctaatacgtttagatttacggcaaagacagcgatatctacgcgaagggatttcctatacggatactatatacgcgcgaatattatgcgctccttatacgtagccgagaaaattaattttgtggcacgtatctttatttactacgtttactagtatttttaattcccccctagcccctaattgctcgaagaatttgctctacctagttagccgtagtcttgtatgatagatagataggatcacacttactcgtagtagcttattaaccgatagtcggtttagatcctcggggagactctaggccttggggctctattttattcccggagagcttcttattattaagctttagaccacgtcggttagggctattagctttagagttacggcatctatctcggtcgcgtcgatttagtaactatactccgcccccgctatatattcctcgttagtattaccccccgaaggtattcgtaacctagactactccttacttactaattttaacgataccggactctataagaaagatcgtatcggtacttaaggtagctagtactctaccctccctatagagatactttattccttttaggacctactaattattagctattagtttcttaatagtagtaaccctttcctttaggaagaggagggaatagcccgtacgccctatacctactagctaaataattatagcgagggctcctttgtcgatagagtatcgcgaccctagtacctagcctacggataacttaaccgcttcctatactaggaaatcctgacctctataacgataatactcgagtaggttagggaagcttcgataggtaacctagtatatcgtcgctactaacgactcggcggaagagggctcctatttaagccgttagatattaactaactcggccttattacttcggagacgggcgaggaagattagccgcccggagacgggcgaggaagattggccgcccgaagattcgaacgatcgactcgtaggccagctatagatctttattaacttatcggatctttagtaccacgttttaattctttcgctgagtaggagcgggacgagctaagggggatcctacggtagatatttcgggctaggggtcggataggtatagctgtgaacgagaggcctgctcgatttcgagatctaaatcgcgctttcgctttagactaagccatatagtccgtggtcggacgaggtgagtctgattggagtctattttaaaggcgccgtatagagagggttgctagtctagtgagatatacttaggttatagtgcgactactttatactctagcgtctacaaatctaatcccgggcacgtctgcttaagagagaaccgaaataagcgggtatatttgattctccggccgtctaatattattcatacggtcggtagaagtttacgcgactacttgtatagcgatagcaactctttgtgcgggtcgttcaaggcctatcctcgtcatatattgatagaattataatctgcaacccatccaacgacacaaggaatagggagggtataccatacatatggttcgtggacatgaaagaaacagccaaaatgcccctagctcgaacgatgccaatgaatggctataagggcgatatcgctagcacacgctgatcgggataactagtaggatgtacctacatcccggagcagttaactatggccctaggagtagtcaagcttgcgacaatcatttactccgaggaagtcaatgaatctccacggaattaagctataaaattattttcgacgcttattgctctcgttaagactagagctatgacctagcttaatattataggagttctacctagtagcttttagggtacttttgctcaatctaggtattatactctctacgacgctatataacgggtgtcgtcctctcttataaatatactattttctagttcagctctcttttaatatatatcgggactctatctttcaatcggtacttagctagatttttagaaacccttactatctactaatatactagggtattagagacgatagaattaaatatcggaacgacgtactaaagatatctcgtatcaatagtacgatctaattaggcctattccgaggaggccctaatagacttccttataaattagtccttatagatatagtaaaatctatattatatataaaatataggcccgataactcctaagctaagtagtatacctaacaatagatttaagaatagattattaagtttaattaagtagatattactcctataaccccgaatctaaggatctataatatagactaactagttagtatcgtttagctatattatctcccgcagtatctatataacgcgccggattaattcctagaatgccggttacgttagtatttcgaagttagagataaagatattaggataatattatgaaggctaaagaagccctatttaaggctataactaaggtacagctagaatttgtcttttaatacgttagattaggttcttgtatcagaagggctttaaggttatatagttactactaacagtctcctctccctataaaatcgatactatataagtataatattagtagtataacagattatatcatccttactaccctatcgaccctacttaccccttctataacttatatataataaagttactcgagctattacgtagccttatcgatagaatccgctaataagggttatctaccaccccgtatatctattatttaagaagaacagtcaaaaattatatatagtggaacgatctatagtacctaccggattgacctacccgattctaaatactctaagttacccttatcttgattaagattcggagtaggtattatctctagagatagggcagtcgacctccgcgtatagttatattcgaacgctagtctaaggatactagctaccggtatagcttacgatatagttaagataagggctggttcgagtttatcaagtacccgctctaactctcgcgcgagtacacgggcacgggataaatgctttcgatcttttattactacttaagaagggtatactgtatatactatacgcagagaccgaaattatagatttccaggaataaataatagagtagaactagcttcctcttatgcttccttaatcgaagaaataaagtgagttatcatgctatatagtgcggagttccgcgcgcgcccgcaggaaacccaacggctagcatgtaggtaatttttacacgttggctgaccgtcatttaagtataacttagctacccatttctatgggccccgaaatattgcttctcaagccgacgtccaccgtttctgcatcctttctaggctcctagcgcctctgttttctcaaccacgctgttaagtatgaccttaaataactccgagccttaggaaccttcttagataccgtgttcttttagaagatagtctattatagctcctatccgctagctagccttataaataagatcagccaatttacttacttactctagctcgtcggtaacctacgttagggccttccgcgtagtggttaggtcttagtcgagctttccctagattttctctatacgaattacccgcgaattcactacagtaagaatacaaagtatttcctatagaagttaggagagtcttattagagatactttagtaagattgtactgactagagtatctatagcttagctaattaagcttaaggaaaaatgagtgttattaggtaggtcctaaaaccctaatagtcggatgaatcaagtcctatagtctcggtttatctagaggataaacgaattagtatagtaatactaccttagtcgaccacgtaactaaggtattgctggtttgagaacgttagtttctgcgggctagggcggcctttatattgaagaccggatcgctaaacggatccgaaaagaacacgctgttatctctccgtataaggctatagtatatactaagtcgatatggtgaagtggccgtcacggagacacgaggaaaagccacggcgagattatcgatagcgcagatgaccataattctgtttatactaatatatatataagtctatagagcagcgattgttagtttgtcatagcgcacatagttatctctaggcacggatagattactagatatcattttagttctacagtattatatctgcagtgctttctttacccgcgagaccatacctacactcctattaagaattctcaagacggtgggactggaggtaatatatattgtttgttgtccgccactctcgtcaaggcgaccgacggattttccaatcctcctttcctcgagattactagacggtgagtggaatactagaatgtgaattttggctactgacttttactaggatgtcactgtgaccgttgaagatgaacaaagcccgtcagcagcctcacagacctgactcgcaggtcactagcggtggtatactccatgtaagggaaatcgatggtggaatggccctggatggtctacaggacatgaaggatgaccgatttaagaacattgtcaatatagttgaagaagatccgattataagtctgcgtggcacatgcacatatatcgtttaaaaagactgtgatccgttgagatatcaccgcattagatggcaggcctctctgaggtagatctagtagaagtaattcttggacacgatcgaaggtgctggcactttcgttggaggcttcttcaacaaccaccgacttgaacaaccactgacttccacgttccttatcgatgtgctttttgtttaaacgttctcacttgaacgcttgagtttaaacatgcattgtttcaacgtgctttgatttaacgtcctcacttaaccgttctcacttaaacgcttgtggttaaacgtgctgtgtttgtttaaacgttctcacttgaacgcttgtggttaaacgtgctatgtttgtttaaacgttctcacttaaacgcttgtgttcaaacgtgcttaaacgtgtttagtttaaccgttctcacataaacgcttgtgctgaagcgtgctttgtttcaacgtgctttgtttgaccgttctcatttaaccgttctcacataaacgcatgtgttcaaaaatactgtgtttaaacgcttccctcgttctcagctatcctttcgtacaacacgctccgctttttaaacgctgtcgtcatcagcgccttctttcttttcaatctttataagcttctttctcatgcacactaagcgccctcgctttcaacgctactgatttaattgtcctcctcaatccaacgcccattatcgttggaccttcaagataagaccgtttgacacccccgacttcaacaccctggctttaacagattacctatcgctgcctgagtcgccgtaggagaccataggctacttttcaagtttgtccagactcagtatgacgatcttcaacaatttaatcaaccaaaggttacaggacagttcccctcgtctgaatgttgtgggctcagccctcgaaagtaagtcttaaggaagcttcaatctgaacggttcaattcgctaaccagtccgcatttttctaccactttccatctatcatctcaactagagcagtagctgtatacgaagaaaaaaataaaacaacggaaggctctggtcttacagtatgatagccatgcagtctctcctgtctatgcacactgcagaaatggcaaaggagcctatctcactgctgtctcctttgatcggtgagaggcgtcgcattccgagatgccaattccacctccaacttgttgacttgtttctcaaatccccatgctcgtttttcggccgcctgaaggcagtaatcatggtattggatgtaagcatgaagttcttccttctctgctttctccttctgtagcgtatccctgatcttgtcattgatgccaagcaaattgatatactcaccgtatatctgggcgataattgtctccagtctttcttttgaatgttgtatacgttgttgacgggatggagggtgtatcatcttccgtggaatatttggacgattgttggtgggtaaggctggatgggcgcctggtggggggacaatagctgaaaagcgcgatatccttgctctctggggaggcatgttggtgcttgactcggaattgatttgttggaattggaggtttagaggccaaagtgatgtggaatggcataatggtaagggaatcgtagcatttatattccccgatgaaaggagtacacatgacatgacggggcggggtcttgcgcaccatccctgtaagcaacgattcctggaaccaagcaaaggacccctgggctaaacatctgtttctgggagctctaggcttatgtttcggcgtccggtactccgggaagcgctgtgagggacatacacgaagtgcacaggtactgtacaaggattttccgaatttctctattgcaatgaagatttgatcggttcactgtatgtgacatactctctggtttccaggagcctataggcaccgaaaatttgagaaaaagacccatcgcgcgttttaattggaattatggagcgaatcatgcctcctgggagtttgtattcatagatcgccgggcccactggcttcattgacatgagcactatatatgaggctttttttcagatcggacaaaattcgaccattgaccagacggcgacagatagcccggacttgctcgtcaaatgccatctgtatcacgaaaactatggatccgaccaccctattcagaatggaacctccaaccccggagcagaccgaacaccaaagcaaggaaggcatatggacgcgcggactggaccagaatcggcgaggaagtagctcgatagatgagcccatggaggcagatcaagaccaggccaacactcgaccaggtagtggaacaccttacagcggcgacggcctaggcggtcgaccggtttatacccgacaacgccccacactatactccaagcgatggttcacgccagatctaaaggcccagcaagtcgaagtcaatcaactacgtaggaggtagcagaaaaactacgctgagttaggaagaacacacgctgataccacagctaccttctatgcaatacaatagaaacgaagagcgtggataagaactatcgaaaaagccaagtccttgtattagaagcagtttctagacgaagctagtaaagggaagctctagaaggctgcgatatatataaaacctcgagatatataggattgcgtcctagtactacgagtaggctcggaggagtatatctaaaacgaagacaaagcgaaagcattcctagatacgttcttccccgccataagtctacctaagttcaactcgccggttatactaacgacggaactcctatagcacccaatcacagaattagaagttaagcgattactaaaagcagctaaggggaatacagcgcccggagaagataacttaccgatactagtttagaagaagctttagaggcatcttaagacctttattattagtatctttatagtaagtatagagcttaggtactatctgagatagtagaggagcgcgaaaatcatcgttttacgaaaactaggcaagcctaattactctaaacctagtacctaccgcccaatcttactgttaaacacgcttagcaaactcctagaggtagtgatagcccgacagttatcctatctagcagagaaatatagcctactactaaacagctagttcggtagacgaccgggtaggactaccgagtaagctctactagtactatctagtgcgatcgataaagcctagtataagtagactgcggcacgatccacaatatccgcggatatccacaatccatatccgcaaactgcggatatggatattttttgatatccaagatccgcagccttgcggatttggatatggaccttatatccattggatatctgcggatatccaatggatatcaaacaatacaaacatgcctagactcgtgacctcaaggggtgtgcattattattatacattcctatgtatttttcgtgtaatacttggtactcgaggttattgaatattaccaggtaaaccgtaagtataatttctgaccttagtcagaaattatgggtagaaggtcaagtactgttctactcacagtagtatacaattggaatctctgaccatggtcagaaattcagtctatacattttttagggggtttatgaatttaaatcttctaggccctatttactatttatagatctaactggaagccatctggtaaccttggctgttttcgaatccgccctaaacggcctaatatactcccatcgaccagtatctctggaagcttatcatcctctttaacagcctcgtatggttgtttttaaggttgttttccttttacccgtctacattgcttagtactatcatcatccaagttattatcaccgctctcagtatactgggtagcctcgagtctagtctcttaatcctcctccttattatcactgataggctctaagaccttaagctatggtaatgatctccgggtttaatctagtaaagcagctttaccttaggatagatgctctttaataatccctagctcctcttgccgaagattaaagttagtagcaaactgatatagcattaggccacagattgtactcggctttaattgactacaacggtaataatagatatcataagcacagttaaatagtcgtttaataccagtactactagcagggatagatagaatgtcccttactatcctagctagggtcgggaagctcttcttatattccttccagaaaagtcgaggtttctatcactcaattctataagtaagatatcatgtaatctcgtcgttatctggttttacaagctcttctaatagctggttctgggatatataagcagtattaagatcacagtcattattcttattaatagctactccagaagtctccagtactactgggtcattggtattataggtaagtatcttcctatatcgatcaaactcttggcttaggacctcttgataataatttatataatcaatattaccctactaatcagtcgaggaaaagtaccagagtttctttaatagagagaagattgttactagagtatagatattactataaggcttatagtcggtagcagtgtagtacttagagagctttttctttactatttagagtgcccgtaatatccatttcttctagattatacctttattcttaagctttaccttagctgtatcgagataggagaaaagcttattatagatactatagatattatatatagtaatatcctttatctttgatagcattattataaaatcaaagaagggctttattagaagaagaagatactcgacttaacaccactcttctagattaagcttaaaataaagatattaatgattagtataatactaatcatagaatggctggagcttcttagcctagttgagtattaaaaatgttaaattctattatatccaaatatcttggattagaatcaatgtaggctctggctaaagggctataaatgcctcctgacgttgtgggcttatattaataaagactactagtccttagatcttctatacttttattagtctagctattataaggatctaggggtagaagatataccttttttaatatatctatgatctggataccgctagaggtattacacttattctagaaggagtgggttttttcctcagaccactctaactcaatctctttattacttggcactgccttaagcttcctaagaagcttatttagactcagctggattatatgcgcgatatatgggacacagaagattaagatatctgatgaatactaagactaaaggtggtcctagatactctgtatcaaagtattattattagttgcgttatctatagtcactaataggatataatccgagataccatactctgttaggatctaggtcatagttttactaagattttcaccagtataggagccatagagaggctcaaagcctagaagaaccttatagtaatcccagttataatcaataaagtaaccagtgatagttataaaggcctactagaaaggagaagtccagtaatctaaggctattgatagccgatacccctctagaagtctctatagaatccccttctagttattctggattattatatcgagataacatcgaatggtttatactaatggaattgtaagtttagtagataattgttaagcaacctctaattctatgatctggatactgctggaggtattgcgcttattctagaaggaataggttttttccttagaccactctaactcgatctctttattgcttagtactgccttaagcttcctaagaagctcatttagactcagctagattatatgcgcgatatataggatatagaagattgagatatctaataaatgctaagactgaaggtagtcctagatactctatattaaagtattattattagttgcgttatctgtagtcactaataggacacgatctaagataccatactctattaggatctaggtcacagttttactaagatttttaccagtataggagccatagagaggctcaaagcctagaagaaccttatagtaatcctagttataattaataaagtaactaatgatagctataaaggcctgctagaaaggagaagtctagtaatctaaggctattaatagccgatacccctctagaagtctctgtagaatccccttctagttattctagattattatatcgagataatatcaaatggtttatactaatggaattgtaagtttagtggataattgttaagcaacctctaatatatagtggaattaggggtattcgatcactcaaaagggcagatatatagtcgaaataaatcttagaatagtattagagagatggtcttaggtaaatgatatactagtaatacctggctagattaaagtactcaatattagctgctaaattataaagaacttaactactatagtaatgccagttaagtgccctagttaatataccattcttttaagaagctagtcgattcttaggccacttttttttaaatatactccagttttaaggtatgctattataggcgaagaactagtacgccggaatcttagatggctaatcatacagagatataccttatatataaccttcggctttccatttttatcatttataacctagtagaagctatcctagatatccaatttgctttttaattcctatcgaattgtattcctaatattagactaagatctatacttagttataagctactaactaacgaatttattgcataagtcctccatatcattatatatagaatcagatagatataaaacccagtgcttttgaaggggaggtctaacgcaagtaagggataagggcataagggttaaataagttaaataagtcagcgatatcgataggactagtatttagatacctaaaaaatcggagaagttattagggtaaatccaattagaagctaaatccatatctaaattagtgaataagaactgtgattaagatattaagaagttaataattataatatatagtatagtagggtgcttaaaagaatagagaggcttatatctgaagtagtagaggtttttaggggtaaagtaagcgtactaggatattctaacttagacttacttttgatatggtttacctaaatgattggctgtattatatattagtacggataattggaggatatcctatagattttgaggatatcttaaggatattgaggatatcttatagatattttgtggatattttgtggatatccataagatatccgtaagacctcgaaactcataaagtccgtatttcaagaacttctatctcggatttctcaagttctagtagtcagaataaattgaaaaaataatcagtagatagctaggactctcggcttttatttaagcctaaggttgaaataattcatctaataataaaggttttgattttctatgttctgtttcttacgaagtttattattgttaacagtagttaaatatatatttctatatataacttataacaaaatcgttaatctacggctatctttataataaaacgtcggactaagaaaactacgatactacctacaaatactgtataaggagaccttcgatacatatctatttcctaaaatttcaaagtgccgaccgtcgatttaaggggttggttctgtcaggactaaacatgcgtttatttcagtggtaaggaaatattggtaagctgcattaagatcatgtgataggctataagggggaaagtaagcgagagttatgctagtgcggatatggatatgaactcatatccgcagtgcggatgtggatatcaactcatatccaatatccgcaaattgcggatataaggatcgatctgatatccattggagcggatatgccgcagtctaagtataagtataaggtagtgaccctaatcgccttcgaccttaaaggtacttttaacggagtcaataagatcagcctagatacgtcgctataggtaagacggatcccgcttatagccagaaaatggattataagctttataagcgaccggcacgctaatatcgggtttgacgacttccgtacggagactactccgctagtgaactctaggctagcttaaggattactactttccgctatcttatttatattctttaataccgacctcgtagatcagcccgtcgactcctagggaggtatatcggcattcatcgacgattacttccgatagagagtagggggctcagtagaagagaatttgactaagatacaatccgaggatatccctcgtatcgaagagtaggcgcggagaacaggatcctgcttcatagcggagaaacccgaacttatctatctcactagaaaaaggggagaatatatagaaggacgaatcatctttaataggaccgacgtcaagccatcgcctacagctaaattactaggctatcaagcgcgccaccaaaacggcaatcgctttaagtggactacgacacttgcgcctagagcagatgcgacagctctaccaggcatatatcgcgcctatagtagactacgtatcgacggtctagcatgacccgcttagggacaaagttcatatccgatacttaaatatagttcagagaaccgtattgattagaatcctatcggcgtttaggacggtagcgaccgcgacccttaaggtagaagcctatatacttcccacataccttcgccttcgctaccgcgcgtagcgtacgattacgagactacatactctaccccgcgactatcccatttagagtgctctgttaagagcctagaaccgtaggaacaatatcggatcatacgcctacttcctattagtagaagcgctaaagactatggacgttggtaggcttaacgaactagagataatcgacttacgcccgctaccaccgtagcgaaaggacgcctttatagagattgagctagaacccgaccgagagatagcgagagaaagagcggcgtccgtaaaggacacgttatagtcgtctactcggatacctccgggcgcgagggtcatctaggagccgctatcgtcgcccttaacgataataataaagtgacggaatcttaacgggtataagtagggtcgatagaacggtggtctatttatatagcggaacttataggcatcttctacgcggtcagcacggtatttaagttagcctactaacgggtaagcgtcggagactatatatatacaatagcaataatcctttataatagtagatccgctttataagcaatccagaacgtaagaaatagatcagggtaacaaatcatctatacaatcctctaagcagctactgaggttcaagtagggtatatttccctccgtctctagtagatactaagatactataaaatcgccgggaacgaggccgcggatcgactcgctaaagaagcagcgcaaccgggtaaaacctatccttttcggccgctactaacgagagagaacgcctttctctatagtaggatctatacttagtaggagtaggagtagaaatcaagtaccaaaggcgcgtacctacggaaagtagacggcgcgctaccagcgaggtatactaggaaaatatacggaagcttgcctaggaaccgagtatacctactcactcagctacgcacgggccacaactagttatccacgtacgctaagaaatttggtttccgggtgcggcgtataggagacggtcagccacgtattgctagaatatccaaaactacgagagttacggatagaattaagaagaagtgttagggacgcgttgaacagcgtgtcgagtctgctgggaggctcatcccgcatatcgttcgcgaagttgggatctaaaccataacccactaggctgggtacggattcgtattttggtctagttgggaattcaactcgcgaggggacagggtaaatgaatcctactactactactactgtctgtattatcgagaccagtctgcgtcaatctaacgacctctagcaaacaagtctcttactgtacaaagacatacataattactctatacagtatgaatggatgatttcatttagcctgactcctagcttttatttgattataggccactatccactagacttggtacgcatttatatttaatctagttggtgagccagttcttttggcgatatacgtgatcggattgtccgtgaaggctcacgtatgtcaatgtttatgaggacctttcggttgtctccgaaagtgtacttgtttgcttgactcctgtaatgtaaaacgctggaaagatatcaattatgatgaaattggatggaagaggaacgacggagtctcgatatttagagcaacagataagaagattatggaagttcattctggccccttggctgagccttttgaccaatgccccttcagcgtgttttcggtgctttaatgaaccagttttagtttgcggatttaaaacgaggtggggaaggtatttcaaagcaaaaaacttacgatcaataagagaagaaggaacgaatagcggcgttgacacataggtcggttacttcactcggaataacatcctcgtaaggagggttgcagttgcagctcgtgctcaatgtaatgttgttgccactgtcggtagagaccttaaccgattccgtgccggttcccagagtctggcacccggcttcgaagcctccaacctcttttcccgcgcctgaacaatcaattgtggagtagtaagtaactgaccacagagcagatgctgaagtggctagtctaagtacgaaaggggtttcgaaacgcatgatttcgatgtttaggtgaaattaatgtatgatatgcataaaccaaattgagagtcagaatacggtagaaattcccttgttatatctccttccaaggcggagttgcaccttcacaggcaatacaatggggtctacggggctaaaacgcggccgagctctcccaaccactctctccatacgtagctcctgtgctttggtccacggctcagtgggagtagcaaccttacgtacataccaccggagcctaggtcttttcacacagcaatctctagaggtgcttgcatctttcaccacactcgagcttcgaggaacgccgtcagaagcacgtcgtcaatttaacgcggttaaccccatcggccccaacgcactctaggctcggttgaacgttcatgtgcgcatgcgtggacattttagtgattataaacatcctcattagaggaaatccatcagctcagctattctgggggatgttgaaaatccatgtttatgcaccccctgtttacccttccacgagtttttgacacaaagtgaattggtggtggtatttttacgaagaccaggagccatggtatactctgacactatacgaggcacccttcttagagagctgtgtgtcatcgggattttgtgtatattttgaaatcatgtggaagcttgggccgattcctgacgttgaggctgtgcaaaacgtttataaagccggtcaaaatttaactaactgtgttggttggatggcacggtgtgtgaatgaataagatggttggaatggcgacactaatcgctgtaatggccatgattaaatcgcagcttttaagacaagcctgtgactgttgcgttcttgacctgtatcaattgcatcttttgcacgctcaaacctcccatcatcactttactttgaacaacgggatctttcaaatcaactaaggcgtgtatgttagattttcgtagataccaaaagcaggtgatatttcaaatcagtcttgttgagtgttgagatcagctagtcaaaagtcgtttgttctgcggttttcttggaggattggtattgtgcccacaaaccaagaaaagcggtctaacgtgctgaattctaaatgcctggctacacgaagcctcttgaaacgtcgtatgatacggtattgagcccaatgtgtacattaccttacttctgcggttagtttctttgctcttacgtaatcgtggctgtggcgatgcaaaattgtatcgatctgtaaaatgtatcgtaagttatattcggtttgctgtattggggtttccacaaatatccaagtgcaattgcatacagtgtcatttctccttttaattggtatcatctctgaggaattctgggcatactgtagacccctagttcatgtcatgacttttctgatcgaagggtttgggcttgttggagggggagatggtcgactagagagcaagaaaaggacaacctagaatgtctttactccgcgggcgtttcaattgggtagaatctgaaaaaaggtgctaaaccccatgcattatactgccacttgatcatcttctacgccctggtttgtagagaaattatcggatgtacattgtgaatagaacagaaaaggtatatgaagcaattatgctatggcgccatttcccagtaaagcatactcgaaggcttttttttcttcgatcccgagaaaacctagaaacccgcctgaatacgttgggcttctgtaaagtagcgaacatggtggacatcttccgcatggcgtttgagcgctttatgtccactcaacacaagctggcaatatctgtcaggacaggttatgagctcagttggcttgtatttccgaagatgcttttcgaaatgttctcgagcttttcgggatgaggcaaagtagcactggtactgcggttcaaaaatgcagaaaaggcaatgtcgattggtgagcgagatgggacagcctcggggttctggtgatgaagaggactctgtttccgccgaaggcagttcttttggtagcgaaactatgttgctgccgatggcatattcggtttgtctctcagggttaaatctttcgggtggtactttccgaacacggccaagctcaatcagagcattgaccagagtgactcgctgtgccatatcatttttctctgaaagatcttgcatggatatttgcatcaattccgctacctgacgacgctcatccaaacgatgaacgatcttctcgggcgcataagcctgcttgtcaatatccaaaagcgagggatcgagctgtctgttgatctcaagagtatcgatcgtggaaaagaattcaccacgagctccttcaaatgtgtctttcttcaattttgccttggcacatcgcaatgcagcttccgtcttggctttgagctctccaattttggtgccagccgcgttcttcatagatccatacatctctttggcttctttggcaagagaatcgcgcatttcttacaggccaactatctcagggtgagttgaaagtgaagctcgcgtagtggcaggcaaatcgtcgtaatgagaaggagctcgagggtcgatatagcggctttggtgactcagaatgttcatcaatgcgtcctccgaaggtatcccaagaaatgcggcttgaacatgggactggacacgctgattcatatatatctgaaaggtgctagcatatacatggcccatcacctgttggagcaaaggaagaggtgcagtttctgaacagagtgcctgcgtcagctttggaagtacaatttatgttgtatgggaacttactttcaacagcctcaccggtgccacgccggagatcgtaaggtttcatagcacggggcatgcccactgcgagactcaacctttcaagataatatagatacgtgtggtatttgaggggtttgatctcatgggtgctgataccacaatgggtcgatattggctgacggcagataggcaaattgagcttttctttcacaaacctcaactgcaaggagtggcgcggcgattctacccgggaggcaaaaatgtcctcgatcgagcgaattttgctctcgaacgctccatcgaggaaggccatagcgaccacaagcatggcaatgtcaaagaatggctgtttcacttcagacattaagaatattttccttcaccatgcgatcagcctcgcataggaaaggcagggtacctaatggatcttcactcacttttttggtcttttatcatggcccttggtatgttttaaatcaacttccatcacgagatgatcacggataccaccaggattcggtagaagtatcaggcttatctggccgtagcaaagtgtttttagatcctcgtctctgagatcccattcatccattttatcggtttcagtagcgtcaacctcactcacacttccaaagaagcgctggacattagtctgctcgttcttttcaacatacaccaatgcccccggtcggcttgcagtataagccgacacgagtaagacgaaagcgagctggatgatttgccggccgtccggatatggcgtagtatctttcgtccagtggtaatgaagcacaatgtacaaatcatcgacgttcatgacgggcttttcctcaacagacctatccagattgaaacgttcaactaggtctttgttcatgtactatcacccttctgtcagaaaataaaaagagcagagagcaagaaaaacccacatcattgatatcctggcagcttttcgcgtggaggctacgccccaccgctttgcgatagagctggcaccataaccgccagttctcgtgcaggctgctgaacttttttattttagagttgtgcagtatccactcaagaaatatcatcacatcctctttccttgctgcgtggagagacttcaagtactcctttttccctagaaagtcacaatgcctgggctttgatcagcgcgatattccgggatatgataagaaaagacgcctacttaatccatcttctcttgatgtattcaatgttgttcttcgtggatacagcatgtcgcttttgaattatgctcttctctagttgtcggcggcgctgaacataatactccgggctaggtactatctttgccttcatgcgggaagcgtaagagtctgaaacagtcatggcttcaggtagcaataagcctagcagatgccagagaatagtggcaggcttcaggaaactgaatgggaaagaagctggttggtatggcgataatgacagttgcccagaaggaaggttggagagatacaatgtagaaaagactgttgctggtgagttggactgtagaaaggctacgagatgatggggagggggggcgaccatttaaatattgagaaccggtcttgatggctccgcaagacagacgatttatcatctttgtctggagcggctacaaacggactgaaggatactgagcatcacgtcatcactgatcaattgccctgagcatactgagcgaagggtgagcagatcactgagcagccctgagcatactgagtgaagggtgagcagatcactgagcagccctgagtgctcagtgatcaaaagtacattatgcacacgtgatgttatgatgactaagattttggtaaaaagggagcttaaaccggcgtccaaggtagccatttacggcagccgatttaccgtcaattagcgttgtggtgtaatcaattatcgggtaagatttatggtagatttcagcggtacggggcccaagtcacattatgttgagggcctactgtgtggcacaagcgagaagagggagagagttaagattcatacgtagggctgtatctactacgaggtgaggcttcttgaaaagacactcggaagtatcaggaactaaattgtaaagctgcctagtctccccattcatgtgatataatacaacgcacattgtgtgcatagaaatgcgtaagcgatatcaaattacattagcagcgctcatcatgcatccgtaggctgttgctattcttggctagcgttgaataaccctagctataatgttaattacttactaggattctcaacaaatagtaagccctacattctggggtccctatggtccagttactttttcaaggcatatacagaaaggcagggattgcaactttgaccataaccgccgattttaaacttatcattgcatgcctagaaaaggcaccatttccgataatctttttttttcaagactttattgtgagtattattccgtttatctgtgtcatacgatataagacattggattttatataaaccagtctgccaaatccacggttaaaactctcccagcttacaatcacaaaatggcatcccaggatggattaccctcgaaccaggccggcatcatacaacatgaaggtggtgttcttcgaatcactcatggtctgcctatcccagaacttggcccccaccaaatgctggtgaagactgctgccgtggccctcaacccctgtgattttaaaatgccactgaggttcccgaccccaggtctctgggatgggtgtgacttttcaggcaccgtggtcgcactaggaagcgaggttgctgcacagggacgattccgtcttggagaccaagcttttggtgctgttcaaggctccaatatgtcagatcccatgtctggagcctattgcgaatacattagaaccgagccggatctgactttccatgttcccaaaggaatggaccttgtcaacgcaacctctctctcggggactggaattgcaactcttggggttgctcttttctggtcacttcagttgcctggaacattgactacaccagcatccaaacccgaggatgttctggtatacggcgggagtagcactataggactacttgcaatccagatggtgaagctgtaagtatccccttccttcccataactttctgtatatttggataactgattcatcttgcttagctgtggccaccgggtaattaccacatgttcccctcataaccgcgacttggtgacatcatacggggcagatcttgtctttgattacaactctccaacgtgtgccgaagacattcgagcggctacaaagaacaccttgcgctatgttcttgatccctttgcggaagcaaagactctgcggatgtgccatgcatccattggtcgtaccggaggaaggtactgtgcacttgagcaataccaagaaggcctttgtttgcgaaagacaatcaagcacgagctagtcatgggaggtgccatctccggacgaggtgtcgagctaccagacccatatggcattccaccacgacctgagattggagtctgggctcggtcatggtacctagagctccaaaaattgatagacggtgggaagcttaggccctgtccaactcaaatcattgcaggcgaatttgaagggatcttgaagggcttggacatactgcgaaatggaagggtctcggggaagaagctcgtcgtccctatgatcaccaaataaaacgttgtattgatgtggaggaaggaagtcagaatagcgcgatcgcgaattatttgagaaaatatacattttgatgtacggttggaatcccatgccagcttgtacacacgagactgctcatctctagattatcgtcatagtctagctttgaactgatttacacatcagatattgatctctttggttttcctttgagttaaatctcctgactggtgtgatgggctttggacgtacggagtagagagctcgatattatcggctactcgagtagaaaaagtgtcatcctatgagagtcgaaaagatcgcttaaccaagtaactctagaaggaagttaaattaaggatatgaggtacattcattcgatatgcgttggaaatacggaattatcgacgtaggtggtaggttaggggtctaatttggaccatcgtaaaccatcttagcaatgactttcttttcctccttggtcgtgctaatgtttcgtgtcaaatgtctccttccgtccagctcttcaaatccccaaatcacttctgcttcccatccctttgacgtattccgggccaattcttgaatgaccttgtcagtcaagctggccgtctccagaatttgacggatggagtcatccagtatgccagatttgtcgataaatttgagctgcatctgaatatctccaaagatgggcagtgaaatgtcttgcttgcttccatcaaccgaataactcccttcgctgtcaaagccgcctgggttgacagtttgtgtcatacgaagagtcgtgaatggtttcaaattgccggacaaatcagaacttccattagagtttcctcccgtgtgtgtgctttgtttggcggataggggagtggtctggtggatttgcagcgaaagccgggcgtatttcaacacctttcggacagcccaaggtacgccttgctattctttcttagtatagcgaaccaacatctcagttcagtattactcttaccaagataaagacgtcatctggatcggttgacagctttcggttctaatcatcatattagcccatccgttaggcaaatatcaaatggagaaaacgtaccaataaccaggttccagtaagatcaggaacatctttggaatcaggtatagccatcctcagggtttcagatttagcaagtaagttgggaatagttctttccttattttattttcgaaatgtatcactctggtaatgaggcgagtcgttccttttaatagtgaagttgaatattctctactccatcccagggattgctacatggatgattctaaaacaacatcggactcggactcggtgtccgaacagggaatatcgagtgcaaatatccattcatgcacagactgcggtcgcccatcaataaaattcttatgggttgaagagatcgaacgcagcgtggcttctgtacctggttgcttactcaggggtaaccctacaacaccctttattcaccgagtttgtgataaccatgagcgtgaggacacactctccaactctatctgagagttccttcatctcatctctagatgtgttttcaattttctttttgattaccctacataaactgccaggtcctaaaagtcaacacaatcaaggagtaagtagatattttagaataccgaccaggatcataaacgataatattaaataatcactggttctttaacaagctgccgcaagcactccattatttccattaaagacatttcacaaggatcttgttcttgtgctatgacaatgtcgcggattgaatttgaccaatctttctgacggattgtctcagatcgatcgaactctcgatcttcttgggattggcttgggcctgaccgaaatttaagggctcggtcaagtttacccagcattgtagagctgaattcaaccagtacttgaacttgggcaatgagattcccatccaaatgaaactgcccaaagtgtaccttcggtaacaacagaatcgtggctgcatcagttggaggaatgatgagaaatagctggtacaacctcatgaacacagcacggtatatgtgaacaagtgagcaatgtgcctccaatattccaagccacagtgctatatcgaatttcgggattgcacgagttgtcgcttgatccggagatgtcgttgtggtatgatacccagaatcatgtggagatactgtggtgacatcttcatccaagccatttccgccattttccgagaagataaacaaagagtcttcatatccgctgctctctgtttcaaatcgctgtgtagcaaacgcaacatccaaagtctcctctgtcataccacacgaagatcgaacaattgccaaaagccaagaggagtgatcaagcagacgatatatcggaaggtcgagggtttcaattggcaaattagaattttcatagaaaagggatgaagattccagaagcatcgacccagtctcaaatatctccaaatcctcaagaagttccaccttcaatctcaacagactcttacgaatgtcttgtatggaaaggagagcgccttggcttgttgtatttgcgggcggcttccttatagtttggtgattcacccatgcaggatctggaaattccttcattgcaaagggcgattcgttctcaccatggttgagaggtttggtttggaagggctcgtaaattgccatctcagtggcttgcctggcacctagtggagcatcactggtgaagactgagggaagccaagaattcccctcataagcgtacatttcatctgatgggatccaatcagaagactatagtaattagtagtcagtaaatgattactgttgttttcctcgggctccaacttactaggttataaccatcggtcgatgaatttgaatggggatcaccccaatgctcaacgggagccatgatgtttccaaagtctaggggcatattaaacccaacctccaccgagggcgaatggaagctgcctccaggaaagcctggcattgacgctactcctccccagttctggtgctctttcgtgttgtatctccctgggattggagagggagaatgcagtaacttcttcactctagggccggatgatttgtgaagcacagacattgattgatgccgttggttgaatctttgactctcacggtcctctcgcgcaactatattatgaccatagtttgagggtaatatgaccggcgcaggctggttcatacttgtgatacatatttcttgggctttaagacatcgttcacaagacatgccattcatatgatcgcgctcgcatcgcagcttttgcccgcgacaacgatcacaagcggaccgtcgagagtgccgataattgtggattgaatgcattgtaaagaaaaaaagagaaacgagaaataacgttccctatggtagccaacgagataccattcatgggaagctaccaagcgcaaatatgtacttcgttcttgccccactgaaattggatgcaatacaactgtcaattggtttgaatcattctcatcagcacatgtagaaagacttcaggctcaaggaaagacagttctattcgaaatcagatcctaggaaaaaggccaggagaaaggctagaaaagcgcgtggtttggtatcaccacgcctgtacacctctctattggaacatgatccacatcatgcttgaacatgaccttattcgttggatactcaatttttccacgcccaatcctaaagtgtgacaaattctcagctcatagcaacttagccctctcacaacatgtgtatagacatgcgtacatgcagacagaagtttaagggtatttttatcgcatccatgaactgaaggctgaactccagagtcccagtacgaggtgcgtcaggctttatggaagatgttacaccatgctcaaatgagaacaatgtatgagagagcagatctgctgtgatacaacatggaggtggataatgtttcacatagatactaccactccgttttatgggttggaggccggcttgacgccatagagcctaatcattatcaatgaaacatagactaccataaaataactaatacccaataaagagtagataagttcgatttggaagatcgtagttcacgttgagcccagaccacatcgacattcggagaattaagggcccagctcataatctgcttgacggttctgggcccctgatattttcttttccccccctctgctagatttcatattctccctccacatccttaagtccaccgattagtagtattccagtatcaactgtcgaggggcaaaaaatgcaaagtaaggggttgaaagcctgactatgctcctggccagagcgcggctggctttcaaacactagcaatgtcgacggattataggataccaaaaggaatattaggtataattcgaggacacacatatccacttcctttttttattactgccgtgtagaaccccgtgcgctttatctttgatgtcaaccctctaggtattcatttacattgaggctgcgagccgcttatatcctggatttgcgcctaatatatccgccagaccagcctcagatgggaaagatccactataacaacttgaaattttgtcgtaacttctctagttgtaataagccacttcttcatggaactcggttataatcagacaagtattcatcgatagaaaacaaagtcgaagagccttcatagggagtttgccttctgcccagtgtgtccattccactcctttatcacaacgcgaactccccgacttccttttcgcgggtgaccattgaacatgtctcgtacgattcgaacgtcatctactgtagtctcgtagagctccatctcaaattctcggaaaatggtggcgattgctagaagaatctccgcccgcgcgaggctggttaacagatgctagttagtacacgatttaaacagaacaatcaaggaaaatccacatacggaattccaatacactgtctggagcccttgctaaaagcaaccagatacttctcgaggcttttcctctgctctgggtccatccatcgctctgggatgaagctttgagagtttgggaagatatcttcattatggtgcataaatatgctggtcatccccaccggtgtctgatgtatattgtcaaaaagaggcctagatgaccgcaaaataggggaagcagatatcgtaccccgggaggaatgatccagtccttgtaagtcataacttgatttggagagctgcgctgaagccttgttgccacggcattggtgattcttcatggaggtcaaataagaaaacgataaggatttgccaggggagtcaagaaacagaagtcttcataccttaggccctccagcataacagatgtctattatattatcagatattttggcatttcatgaatcgagtttgcgagcaaacaacttacaaggtacggcattgcctcgtattccaccaaagttgcggttccattggggtcgagtcggttgagctcgtcccgtagcctttgtagcttgtctgggttgttaagtagatggaaggtgagtgttgtcagattcttggcagttgtttcccctccagcggagatgacggtgaaaacctcttgactcaggcggccaggcgccttctcctctgggggaagcttgctgtctagcaatgcatgaaacaatgtgcctttcggcacactaaccttatcatctgtcaagtttgcaccggcggtctggctagcaatgatcgattccgcgagtcgcagactttccagtttctggtcaattaccgggccgatgtgagggttgatacttacaactagccaccgtggaagaagctcaaacaagccgaatacccagcgaaactgtttgaattgaaccccgacttccacaattgcctcgattgtctttgaccactgtggtgtaaaatcagggtcgtctaaataatgaaacgattcacccatggaatactccacgaccacgtctgtcgtgtaggcattaaatgcatgataaacatgtagcggtgtctgtctctccttccagtttcgcattcctttgcgcagcttatctatcattttccggagcatgggctccaattgtcgaattcgctgctgagaaaagaatgggttcatgggttgccgacgtatccgatggtggcggtgatcgactgagccgaaagctgaggccggtgccccaaacatgccagtcaaatgtaaggatttgtttctcggtttgtctcgagagtataagatttcatagtactctgggtcgtcgatatgaagttcaaaggggctgattctcacaatcgggccgtatttgcgatgcatctcagcgattcgaaaagtgtactggcccccgaggaatgaatcgtaatagaactcataccacattgtcagagcggccaattttggtccgggaaaatgggcgagtggtgaaaaccatagccgatatgttgccaaccacaccccataggtcattccaagcacccccagggccaggatgggctgtgcgacaatggcattccaccaatccatggtattttgatttggagagaaagaagagactcgtagacgaggaaagacgcaaaccctgaccttccagttcggggtgtcttcttgaattgttgccccacacctgtcaagacagacattatgccactaggtcagataatggatacaaaacggtgattggaatccgtcctgttggtaacttcgagcgtcgtatctttgtggatagggaaggatccaacctatcgcggcacatccgtaccaacagaaatagctaatcatatggatattagttccactatgggtctgaagaatgtgtccagagcttaggatcatccatttcactccttctaagaggtccggatttatgacatccaagccccgtccaagggcacggggccgcgccctcggcggaaccttcaggatctggacaaagcgttaaaactgccgacagctgaagaatcataatcgtaacgatgaatcatgatgtacgacgattaaagaattgttgtcgctttcatttttttactcctcattgtactccatgcattccctttgtcttcaaatggatgtgacagatctgtaggttcatgtgggaatattcgaaatgcctcatagacaatgcgattgttcgaaattgcatgaaacaggagacacaataattcttaggtatttttatcattcgatgcgatagggctaccgtaatatcacaggccgatcgaaccttgaagatgacttggcttggacacggcacagtcccaacaaagacggcctaggagaccgtaaaataaggggttttcacacaaatcgatttatattgtcgtataattccatacagagtacggagttcatgtgcataaatcagcagatttgctccggccaataatatgtacctcgtattctttgaacatcctgcacatcctttcatttggcaagccaccacgactcatcctgcagagtggggaggtgcggagctcccgcacttccgaatttgtctaacattaaggggtttcatgacttttgcttcaaagtccaaagtacttggtagaaatatggaaacttcctatgcagactaaattggagagacaaattgtatacaactatcggtaatatcatcgaaatggatttcgacctccgagcagaccttgaaaaatcagcaatcgcagctaaggcgcgtaccctaagaaaactctggctgttagtcaggctactcagttcccgttgagttgatggcacaggtggagatgttgagactgtatatattaaagacaagctgggaaatggatcgtatcgtggcggagtacctgttgtccaaatcccagcgcccgcgtgggttgagatgagcatcgtgccatgtgtactccgtaacttctaggtaaatcgataacgctgtcaagctgccgacacgagcaatccgggtacgtcctggttgttaagacattgctgaccgatcagattcacggagatgatggatattctcgtcattacccctttgaacatgtcgttcacagaggagattcaaatgcggaggattggagcataaattttcggatttgctggcccaaagaaaaatgagatggaacgtgctgagcgtttggaggccaaaatctgatttgacctcccctgaaccaggtacttcggttcgggaccaggccattctgacagaagtacagccgaatctgcatcgacacaggagataggagtacgtagttacccgtaggtaataatagcaaagtactaggtatgacacatttcagaagatctctcgcatcattttgtgtaaatatatgaatgcgcgttgtacggagttcggagtagtcaccttgtgtactttttgtggccggaaatgccaggccggaaagccacgtggtctttatccttgttgccttgttgcctggtttctagagcttcaaatttttttgttcatctaccgaggtcttcccgtacaagacaagtgcatacaacatacggagtacaacatacaacactattgtgtccacgtgtgggtgctatttagttgaaatagtggcctataccaccgaagccgtttggaacatatggatagtgcaggtgcactcacacaggtaatataagtcttcatgtccatatcttcttcttgggaatgaatcccaaagattttcaatgtgaacttcgttattaagtagttcctaaagacctatacctctctttggctgttatttgcctttatgtctatgtatgtatctccgaaatatcggtacttccactacaggtaccatttacaatgtcttgccttcctttccgggtggttcggtgcatctgttacctaaaagatttaagaatttttacctctttactccacccatggatctcttcaaggaaccccaccgagttcgttcaagcctctgcagaatattttcaactctcgacaatcgtgaaacggcataccggtgaccttagtgacggtcatcttgttcagatcccatttccaatcggatacaccctgtggcggccctgtgatgtccgacatggtgtctcacgatgcttccgcggcacatgataccaaaacatctgcaaatgtgatctctgtagagtcggacaatgtttttcgagacaccaaagagtctgatgccgagcaaaatcacgcggacacctccaactctggggaactcaagcgcaggctgaaaagcaggcatttacagatgattgcaattggtaagtcttgattttcttggtcaagatgggttatcgcagatgctaactggcttcggtcgcaggtggaactattggcacaggtatactatcttgccctcaggtcctcggctagcaaatccagaagtctgacctatccaggactctttatttccagtggtactgccatcgcagaatccggccccgcgggcgcgttgatcgcctatatatttgtcggctccattgtctattctgtcatgagctcgttgggcgaagttgcaacctatattccaatgcccggtgccttcacatcctatgcagcccggttgatcgacccaagtctcggattttccatgggttggatctattggttcaactgggcctccacatttgctgtcgaactaaccgccaccggtactatcatccaatattgggatccaagcctaaacattgctattttcatcggagtgttttgggtgttcatcacggctatgaacttcctccctgtcaatttctacggcgaagtggagttctggttctcaactatcaaagtggccactgttgtcggcttcatcatttttgccatttgcatcgatgtcggagttggggagcagggctatctgggctttcgctactggagcacgccacaggcttttgccacgtatagtccccatctaccggtatctgtaggcaagttcgttggcttctgggcggtgctcatccaagccggattctcttatcaaggcacggagcttgtcggtgtggcggctggagaaaccgaaaacccacaaaagacggtcccatcagctatccgcaagacgtttgttcgaattcttctcttctttgtcttgacgattttcttcatcgggctcgtggtcccctatgacaacggccgcctcaccacggcgaccaccaacgcatcatcctcgcctatggttattgcagctgatttggcaggagtcaaagttcttccaagcttgatcaatgctgtgctcttgtccgtggtcttatcggccgcaaactccaatgtgtatagcggcagtcgagtcctcactggattagcacatgaagggtttgccccagcctgtttcggttgggtaaccaagcacggtgttccgtatattagcgtgacattcaccgctttgtttggcttgttaggtttcatgaacgtttccaatgacgcagggcaagtttttacctggctggtgaatctttctagtgttgcgggctttgtgacttgggcctccatcaatgcgtgtcatatctcgttcatgcgggtattggcaacccgcgggatttctcgcgatacgcttccatataaggccgtcttgcaaccatatctcgcttggtatggtttgtttttcaatgttcttatcgccctcacccagggtttcacttctttcatcccacatttccgggtgaccgacttctttgttgcctacatttgccccatcgtctttgtcgtgctctatattggacacaaggtgattttccgtccgtcatttgtccgtgccgccgatgccgatatcgacactggccgcttgcactatcaaaagcaaatcgatcctcccatgccatggtactggagggcctggggctggttcacaaattaatacagcatagtcatccataagaacttttatatatgatttgttttgacatgtaggcatccatagatggatatttgcagtgaccctacgtaacaatgatttttcatacatccatgagccattcttggaatcatgtatttatcatgcgttgtgctcttaccaataatcatctagaaggacacctagccccagattctgtaaaacaccctcgaatctccacatgaccggctcacaaagcatcgttgtatgttgccgcggtttttatatccactttaagtgccgggccaccacagataatccgcctatcaatgcagttgcgccggtgcaaacaacgagtgtcccgtagccagtgccatatgcacccaacgcatgtcctcgccagttgtctgccttgagcagagcctcacttagggggccacttgccacattgccaattccacgccctgtttccatgaatgggaaaatgacagtcgcgtctgccaatggattggccttctgcacctcgttggagacacccgcccatgtggaggaaaagccacccgcgagaagaccataggcgatacaaaagacgtataaagggggaatagtggcagcaaacccccaaacaaaaaagactgcgataacggtaccgacagtcgacatcaaaatgcaggtagtgatgtgatatcggtcggaaaggaatcccatgatgacagaaccaaacactgcaaacaaattcacgagcattacggtgagagacgccatgtagtcagtcgcacctagactgcgtgcgtaggtcggaaggtatattgtcggcaagaagaatccgattgcttccagcgtgttgccgagctggtaaattataaaaactttgttgtataagaatcgaaaattcaaacggtgatatgcaacttctgtcgtacgcagcctcggtcgatgaaagtagagaaaaggcacagcaagaatgaacaatgccactgaggatatttgaagcgtagcctcaatgccatactggttcaaaagccactggatggcaagtgggaagacaattccggatacaccggacccgccctaagacatatatcagttcgactttccatcagagggagctcatggtgcagaattctgtgtaactcacccagacaataccaaaagccagcccttttcgtttatcgaaccactccgacatgaataggatggtgggagtataggcaaagcatccaccaattccgaagccgattccttgtgacaaaataagatgcacgacgttggtagagaaggaactcagtgccaaagacaaacacatgataacaactcctatggtggacacccagcgagcaattttaggcactaagatcatcaaaattattgccaacggggcaatcagatatgcgataccctatatgttgtgttagcgagagagggcgaccttgagtatcttgccaaccaaccatcgcacaagtgccaataattgcaatgttttcggatcctttgaatggctcgtgtgtactataatagtcttggaatataccaaaggcgaatgcataacctagtcgcgtgttagtttcaacaaaaatccatcttcgaccaagaacaataagaacgtaccccaaactagagcttcgagcattgcagatgccataagaaacagccatgcttgaactccaccatcaaccggcggcaacttctcatcgtctaaaatgattctgctgtcggactgttggtcgaagggtatgaaggatgtactccggctggtgaaactaggagaatactccttaggctccatgatgcaaaatgacccacgattctaaccacaggcgtgatggatatctggaagtacaatgggtttgtgtgtggaagccacggggagaacctcctttgaaaagggtttatattcaatgcggccgtttgacaagaaagccaggatcggcctagaaaaaagaaataagctaatggaagctagctgcatgacgaaataaatctccttgacaagaatccacccaattggagtgcaaagaagatagcgcaaaaccacatacctggaatccaggtagactggggtcccaacaatgtgatattgaacccctagatgtaccgatatggtccgtttcaaagtcacgcgtccaaatagactgtaccgtggtgatctaggtctttggttgattctagtaaacatctcctcggtggagaatgtattctctgtcgttcttcgctcgctgctaggacattaggcagaatgtttcaagttactgcaattcgaggccgcgtcgatcgggtgcgggatctgctccagaaatagtccgaatgaaatgacaacggtctcccctagggctggcagactgtttaggtgcacgaaccgccccgctcggcggataaaatgggaaatggaatgttgatcggggatcattgcatagcagagctggtgggctcggagaattccatgttgataacaggtttccgacccgctgtcattggcagagataagaaccaaaggagactcacttttgtcctaatggatgaagcttcgtcgctgtgtagatccaatcagtatatatgctcccatttctaaatgaggtcatgcacagacgttgactctttgaatgcgttaaactcgtttgatactaccaaatgacataaattccagaatcacatgtctttaataagatatcgtcagcgaacgggacaataaacaatatacatacaatgtcatacctcttcgaacgctacacggaggggttgagtgacattccagccaacggagctactacatgttcttccattgaaccagatagcaccgtctcctggcattattagagattccactcttatcacagtcaagggcattaatgtccatcaattcttcacaaaccagctcggttcctatcatggtctgcgggtacagtcatcgtgcattgagtcccaatgctttgttggtggcggaaaacggctcaaatatgttttggacgatcgaagacaatctgttggtctgtcttgttatttaaatgactgatgaggttcatatggcacatggtctagatgatttgagaaggaggtcagttatgcccacttggacatctgaggttgtttacgtaatctggtgattccgggtgcaggagaccatcttgctcacattttgaacaaccaccgtataagacattctatgtcgtcgaatgaattttccaagatatatagcctcagttctgaccagctcaacaggtaaattacgccatttcataatggatttgtaataggcatggtccttctattctcattctcaatatcattgaattgaattgaattgagtcgagctgggagttccagactgcgactattgacagaagggagttaagtctgtagggactcatatcccgaggcgatcgaagtggaaagtgtattgctcaccatcccgagaggcctccgtataggtcagactgtcgccagcaggaacgtcagttggaggcgaaacatgatcagcaaaaccgcaattttcatcccaaggcagaatgaagagggtctcatttcacgaaggcgaatgtcgcacggcctcatagatgctcttgacgaagacctcgtccatattaatgggggatggaggatgcattgacatgtaggagcgacactcggggttgatccaagtaaattgtagcagaatcccagctttggcatcaatatagaactgggaaatcggaatgacgttatctttgccattcttcgcaatattttgaatacaaaaagaaaaagatcagaagttcctagtttttgtgacatatgatatgatttaccttctgagtgatcagagtaagtggtggtatatatatcgtacaatatcatccaagtattcatagtgagatcgggtgcattagcggataaccccttgtatttgctttatagaaatgttcaggtcaccgcatattcaatggctgcgctgtggattttatacttttgttcgaataatcattttctgtcttatgactatcattttacttcattttgcagactactagagttttgcatgatgagtcgaactacactgtcccgtgaagaggtcagctttctaggtctcggcgccgaaagcagcaccatgggagcagttccagcaaccccggtatccaggccgataaccgtcttggtattaatgaaggtgggattttgcttcgatgagcgagcttgctctaagtgcaccaacaatggccacttcaatttgatactatagaccaattcaagcctgacgtaatgtaatgccgacaccaactgccaacccccacgttttgaccattgtattccttcaaaatgatgactggcaaaatatcgactcgatcacaggaattgggtccttcgaagagtggtcgccagggctcaagaatgtgttgtgcccagtacagtcagggccgctgtactacagttagtgacagtccaattcttgatcggcacccgacttacgtgaagagacggcatggctttttcaaagacacggtgagaacgtccctgtgactcattagtctctctcaaccgaaacatggtaggtggaaatctatctcactcttcctcgatcggatggcaatcattcaatggcacatcaataccacggctcttatcggccgtttcaatgcccacctgcatggtcctgttagcatcagagcgtggacttcaggaagaacatacgcacgagtgttcttttgggattcttcgctgccgatgcagaaagaagcatcaagcttagaagcgacagctgcttgagaccgtacatgatgctgatgacaaacagaggtccgataatggtagtaatatgatggtactccgtataggatatgtactcgacggtgcctgcaagtaaaacgcagaaggccaacgactctttcagcaagaagatgccagctgtctttcccattatcccttgcgtctgtttctccgagtgctagggttacggccaactgtatcgtgaggttcacacccttttttgctgtgatctgccctatggaatacggagcatatcgtggagatcagaatatgactgctgattcgcactgcacggagtatcgaaggttatggttgaggtgcagtgtcgatctaggagtacccttgaatcttgggtgattctgaattctatggatacccatagaagatagagcacgttctgcaagtaacgtgaattagttaataaatactcgtcaaaagacttctgaagtctccaatgtcctaaggagtggaagtggccaggcgatgtctcccggttaacctccacttcaacaacatcaacctcgattcttttagtcgagtctcctttctttgcattttctcgactacgctcctattcacaatccaacaaaaactcggcggtttcattatttgatgagttgattcattttttattggactgggacaaccgtcgcatgtttacgccatgagcgactggtcccaccctgacacgactgcatccaattccaccggtgctgcatttactccgccctactgaatgcgatcctcgcgagatccgcccaacagatggaaaggaagaagggggttcaagactcatatgacagcctggagctttaccaggaagcgattcgcctgctaagccccttactgcaaatgcgcgatcctaaagttgtcggggcctacgtactgctctgctatcttgaggataatgtctgcttgcgcgcaggattggcgccgtcatttggagggatgtacggcattttttttacgccttcgaaatgaatgggttcagcagcggtcttctcgagcagtgttttggtgctacgcacgcattggtattggtgagaatccatcttgttacatttttgccacacgacagcgcatgcatccagtgcgacatcgggtcagtcgagttgtttttgatgcttcatggcagcatattggaggctccagggctaggggagctccaatctagaaggtgccaagcctccagattaggaaggtgcaagcactatccctgaccatcacctgatttgatttgtcaccatgtttacggtccacgggttgccgtggcggcaggaacttgttgagagtcaaacctgacattcaataataaatgctacctaggaaatcatgatgaacaatcgacacttggcgcaactacggtttcttccctgccaaacctcgactcttcttccattcgtccacgattccagcatacaccgaaggcctatacaccccggtcagctcagtgtagaacccacctccgagccggtggggattcagtcccaaatcgcgcagtagcaagtcattgtactgatcgaatcgttagattacgatgtccttgtggtttcacgcaacaaacatacctggatagcttcaacttcaaggccagttcccgtcaatgaacccaggaccacatcctcggagatagcgttctccataacctccagcggaatattcccaagcgaaaaagcctggtcttggattgacttgatgtccgcgggggagtcaagccctcctgttaaaaacgccgccacccaaagagcttgaacctctgcaacaacagcaatggttgatgataaaatcacaccgagcgttgcgaaggagcggtcacctcgtgcgactaattcgggggcaaccatgcggcggaacaagcgatatggcaccagcctgtgagattcggcccacgagggaggactccgatctgtgagagcgcatcttgtcgcattcaaagttttcctgaccataacctcggaacattgatctagattgtcccagcgttggatacggtcattcatggttgcctcaagcggcccattgattctctctggtgtttccacgcgaatttcacgatcctctcgaagatcctcgccctctgagtccacgacggctgacaaccccaattttagacgaagacttgcaggtttaaacctaatcggcactattggcttatatccggtggcgtggatgaccaaatcgacttcatcaatacaattgctgtctgccaagtgcaccgaagcttttgtgaatggatgcgtggtcttctccggcctggtagcgacaatatccatgatggctgatcggtaaacgttgacatggggtaatctaattgtttcccagaggtcttcctggtttgcgatgccaataccggatgcgcatgagacaacactagaaatcatcagtcttcaagtaacacaaatgacctctcattagacttacctgttctctgggcgaagcttttccatcttcggacctgagccatattgcgctgtatcctctaagcctttatcaattgatcgccagagccaacgaatccaccatcggcctattgggttgccatggaatagccgggctagccatgagccctcccaacggagacccccgggtccgagagacagacgttttggagtctcatagcagcatggggtgagatggctgagcagtcggctgctggcagccttatcacttgcaacggtgtcgccattcgggagagtagaccttggcggtaccatccacgcgggccctacacctcgatcacggatgatccagtgtacctgaacaggaattttctgtgtggacttgaggtgcaactttgggtcgttgcgatgtagagttgcaaagaaatgcaccaggtcaaaggatgattttgcaccaccataaataccgaccgagcgcaattgtgggtaaggggaatctgtgactgacattttaacagccccggactcaggtgctttcagtggctggtatcccaggtgttttcgagcccagtctccaatatcctttgcatggatgaccgggggagggtcgtcggacgccgttgatgactccttcgtatcgggcatatttggcaccgaggtcagtcctgtagccaacaccaacttatcgcagatgatggtgacgcgttgactcggcgacgtggacacactgatgtcgagcttccactctttagtgtctagacggctgatgtcgtcgacctatcgatcattcagaaaccccgcaattttagaatggattgagagtatcttaccgtccagttcaatcgtatgtgttttttcagctgccatttctcagcccattcacggagataacggttgatcttccagcccgcaatgaactgattctgtgtgtcatccccttgttcctccggaacaacgttggaaagaggcatatcactgaattcataaagtccatacgagttctgactcaacaaatttgggtaaagacgctcctcggcccaagtacctccaatatccgaggcagagtcaatcacaagaaggcgacattcggaggaggctgttggggaagtatcgatgctcttagtgaaacaggcagggatttccgtgatttcatcggtatgttcggctgtgctttcgtcgtcatatgccgcgacaagttgtagatacgtcttggctgcgatgagaccgtaaagacctaaacaagttagccaacgtccaatttagtcgtcaactgctaccaaccggctccaacgatcacgactcgttccatggctaaaatgattgaagagagagaagtcaggggagggaaaaagacggagttttaaatcccaaagtgtacaatgaaaaggtaacaatacgaagaatagctcggagctgcgaggattttgatattgttcttgtggggtcaccacaacaatgagaattccatttgaaatattgaaagtagtattttggaaatatcagacaacttgtaatggaaatatagtgaccgacatcatcttctgatggtcagctgtacctcgaacaggccgaacagcgcgattgactggcctaaccattctacacgtccagaatcaatgcccatgcttgatattgcaaagacacgcctactcacttcaggcgatgtttagatgggtcactaccaatgttgtaggagatggaagataatattcctactccataccccgtaaggatgtggtccccacgcaaatgttacatatttggtctttgtgggctgccgtaccccgtaccgctcgtgttgttgacctcgtcatctcgcgtactccatacaacatcctccgtacagcacacattattacatcgacaatatccatatcgatgtatcggcctactgttcccgagcatggagctattttcatatgaccaagccccaaaagttctatccccgatgtctgccttcgcccgtgacggggtcatgacttccgcctgtcaactatataacaccccgggttttgatgctcgctgcgggataggttgtgggatatctgcgcctcaccccagatgaagtcactcagctcaggggtctttctatctacttcactggctgttttgccttccctcccatgagctaactaggtacctgaagtcgcctgccatagtttcggttatactcgatcggagccctcggtcacatcggcaccgcctagcccggcagttgcttcacgggctaatcacatctcggccgatggtttgaaatccctgatggccggatttatggatcttttcccgcacctggcatcaagggactttgaaaaggcggggatttgctgtacaacggacattccgaccggcgatttcatctttgattcccccttggagcacaagcccttgtttattgctactggaggaagcgtgcagtaagtgaacccaagaatggacctttttcgggggatgttaactaacattctcatatccagtgcgttcaagttcctgcctgccttccgagaatacattgtgggaagcttccaactcaggctttcgcgggagttgcttgacaaatggaagttccctacgcagtcccgtgggcgtttccaggagatattcaggggagatggacgtcgtggaggaccagagcgaagggagttgactgctcaagagctcggcacatttgacccggcattgaaatattgaaagctgcttcacccaggccaggcaagatttgaagctgcgaaggacacaatccaggcaatatatcatgttataaagaggagcagttaccaattttcggagccattacataccttgaacgaaccagggcacgctaatgatatgaaaacatcagaccccttacttttcttcaaggccacgaaagacgatttgaatgatagatggcccgactttatttacctcagccagtcaggccgaggcttcattgatggattaggatatgcagtcaaggcttggaaagttggttggcaattctgatttgagaattgcttgcctgagaggacagtactaaatccgagaagtaaaaaagacccgaattgatgcgctttcttgtttcgatctccggatcattcgagagatacccggggccttctcatttttattcagatattttgtattttgtgatcaatgaggattcaaacagtctttcattcgcgagttcggagagatacgaagcttcttccatttcatggagtaaaagtgccatcagacatttccaccattaccttcacgaggggacacaaactctgcaatcaagatattcgcatttcaatacagttcctacattgtgtcctggaatgtcaaaataacgaacggctcatcggggcccattcgataaactcatgaaccgctcatgtgatcggctgaggcttatacggggaagttttataagttttataccaagatatcctgcctccagcctattcgtccaaaaacaatctgatatctatttccaagttcggtagctatcacgatctagcctgttatagaatatcaaatgttttatcttcatatgcagtacaacgtatgtaacaagccgggcaggaaacccgaccacccgagcggcgttcacccttcgcggaaattgcagccgattgtctctctgatcgtcgtggtctagtgggaaaaaaaggttagacgatcaacggcttcgcctccgctccgatcttgtgatcggtcgaaacccgtagaattcatatcctcattgggaagtatgaactcatgatcacgatggttgtcattgggatcgcgatctatattaagggactcgccttcttctgatagagtttcaagacaaacccattgcgctgcattcctccattgcagaaagacttgtcttttaaccttcgaaatgtcaacgctcaagaattacttcggacttgggggaaccgacgcccattccacccctaccgacaacaattccccggctcaccctctcccttcctcgtggtattcttcgcaggatatacatgaattggagcgacgcgccatattctgtcggaaatggcttctgatcacgcacaagttgcgtttccccaaaacaggcgactggctccgatacgacatcgccgggtacgcttttattttggtgaaagaccgggagggaaacgtcaatgctttccacaatgtctgtcggcaccgtgcattcccagtggttaccgaagagggtggtacctcccggattttctcttgtcaatatcacggatggtcctacggccttaatggcaagcttgccaaggcacccggataccaagaggtggaaggttttgacaagagcaagaacggccttcttcctatccacgtccatattgatgtcaacggttttatctgggtcaatttagatgccagcgaaaagcccgagatctcgtgggaagacgactttaaaggagtcgacctacagccacgtttcacgggtttcaacttcgaggactatgactttgataacaccggggagatgagtggagagtacaattggaagattatggcagagcactacaacgaatgctaccgtttctcaacgactcagtccgacacctcggtttccaatctcgattcatacgccgtggatgccaaatccacacccgaggagattgcaaatgggctgaagattgccagcacttactacttccccaatgctactatgaccgtctcgtgagtgtgattgtccggcaatgtaatccgattgatgctaattttgtacgcaggccacacttcttcttcatgcagcgactcgtgcctacgggccccacaacatgctcagtgcgctatgacgtttaccgcaacaagaaatttagcgccgaagagtttgaaatcatcagccaagtgtacaagcgcattatgtccgaaaaccaagatcgctgtgtcgaaacacagaagaatatcaacatgggtaaaatccagcccgcggaagagggaccggtcaacttccagactgtcgttcgtgacctgatcacacagcaccataagcgggaagaagatgccggggaacaattttggcctgcacgacaaagactccccaagggagaggcagtcagcaaagaggatatagatttctgctctaagctgagtaaggatgggtcacctttgacctcggggggttgttgtggaggaggatgtggagctggacctccatctagggcagcaacagcgccggagactatggtggtttaacgatgtgcataatagcgaatgtttcgttgattttttagctctgaattgttcttatgaagatgacatgttacatgcacaggtataaactcaaaggtcatatgaatatgtttatgatacgtaggattccaattttactataaaagagaccgattatagcagtctacaacacacttctgggtgactagcccaggccatttggatttggaagtaggtcgcaaatgccctcgtccatacaaaaactcaatattagtaaaagatagagaggagaatagcaaacgggatcatttaaccctattcagtataaaagttcaggttacatgcacatccacgcacgtagattaggtcgggggcacctatgaggcgaggggaagaggaaaaacctcccaaaagacgcccttttccccctttctccgattactccaagataatctcgttattatctcctaaacatgcccctctcttaaccttgtcatgacgatctccatctatcttatctcttaactagttatcttaactatcgtgcctatcgctccaataccccgctacatccgccccgttttctaatttccccttcaatgatgccacgagagagcgcgcgcggaaggctacgttcccacgaggcctgtcttaattgcaggtaatgcaaatacactgtctgtaagtagcgggtggtactgatctccctatagaagaaagaagacccgatgtccagccgagaaaccgtcctgctccagctgtgtccgcctgaatcagccatgtctttatactaccatacccagagggtctcgaggagggcaatctgtatgtactggcttctggctgtcggtgaccaatcattgacttttttttttgttccttacaggacgaccggctagcattcctcgaagagaaggtaaacctcatcctgagtggcagatcaacccaaacacttgcatcagaaaagacacaggagaaggagataggaaatgcaatttcagaaacatgctatcctgccacaacacgtccaccctccattgaaccaagcacggtcagtgacccattcttcctcggttttggctacgaggactcgatctctcagccgtcatcatctgcgatcgccaaagctattgatctttactttgaatattgccatcgacagccgatctggtgttttgatcgtgaggaggtctcggacccaacttatctgtcagaggagctcgtttgttgcctactcgccttgacctcaagattctcaagagatcgtgaccatttacaacattatggagatagtgcaagaagcctagtcatgcttcggatggctaacggcacagtggagcttgaaaccattgagagtctttgtctactctcttattcgtcatttctaggtatgagcctcggctaccaagtcgagaggattccattgttaatattattctagacggagatatacacctcggtcgcttccatctcggtcttgctctacatctttgccggtcggcaacgctggatctcgaatcgagtcatggaggcgaaggtcccatggccgagcgaaagaagcgtctgttctggagtctccaatgtctggagcagtcctacggacagcaaaatgggtttctctgtatcccatcggaagtcctgcgtaccttctatgttgcctccagtagcgaccgcgcaaaacaagatgggacggaggcgaaacctccaccgctgccgacagacgatcttgggtgctcgaaaccatccgacatggggatttggagcttagcagctcattttggctgggtatggagcagagtgcgcatatatgtctccgattgtgctcgaaataggctcaaagaaccctggcgaaacgattcaatgtacgccatggtgctttccgacctcacagaaattgagaacaagctttcccagtgccatcgatatgactcggtcaaattttacgagcgaacagcagaggagctgagatcgagccgaaactactggaccccatggctgaagctacagtttacttaccactgcattctaacggttctaaaccaccccttcctctacattgtggcatcacaatacaatgacaatttggcaatcccaaacgctttctggagacgctcatccgagttggtcttgttacacgctacctggcttgtccgcatgatagacatggtatccgagaagaagatgcgactgatcgatccgttcttcggacacgctgccgccattgcagctacggtgcatctatactactgctgtgccgcggatccccggctaaagtacaaatccaaggttgatttcacaaaatgccgaaggttcctgaagagttttgtgtccttttcgccagcttgtggggtcttggtcggtgtcatgaaatcaaaccgccgcttccaatgctaacaaacgcgcaggatcaaactttggacaagatgactcgaattgcttccgggtcggaaaatatcgatcatgactgggaacctgagaagattcatcttagtatacctttaatgtgggatgttcttcaaatcaactgtaaacccaagccacacgaagtatcgacgggtggtttgctacatccatcattgaccccaaccgtctctacggaagaggcggaggacagccctgcctcgactctggagattattgttgcgatgtctcccaatgtcacagtcaacactgcggacggtggtcaagctgcgcacattccaccaaccaaaccgtgcatatcttccacgccagcttcttccggccctgatcctggcgagaaactcgttgcgccagctgacagtttaatgaccaataccccctggctatggacggatccctcgcaattcgttgatatggagaacactgtgggatacgcagattccgaatccgctctcggaaacattgacggattttcgacttggtgggactttggaaacttataggagtaatatgttcattgacttctactgcggcgttactgtcttcctaaggccgtaactcttgtctcaatccccgcatttatcttttgccccaaagcccctatgcaaaaaagacccttgtgcggaaacactcctaactgacccccagatcaaaaacttgatgcccacgcgtcctcgatcaagttatgccgctgcgaccgtcttcagcctttcttgcaaggcagcaaagttccgtttcatagcggtttcggtaaactgcgccccagtcaccatcggatatttcttcgagggcccctggattaaagaatccttacagggctgattgaagtaggcaatgctgtatcggtcgccaaaatagtcctcgggctcacaaggggccttgacacgatgaaaagttgacttgaaccggtcatccgaccaggacatgagtaaatcgccaatattgcacacgatctcaccagtgttggctttcaccttggtccattcgtccccaataccgaactctgtcaccacttcgcgaccgggacagatttccagcccatcctggccatccccttggaaaagtaaagtcaaaaagtcccaatcggcatgtgcccctgcgcgatgatacaccttgccgtcgggaacttccggcaaggcaaagtaatggagtagacgcatagttgtttgcgagttcggtcgtgagatgccatgacactcgatgaagaatctctcagggaatcccaggccccgtgcaaagcatcgcatcaaacattccgatacttgttggacgcgattcataaaatcaagacaggcgttccggaaaccaggcagatcgtcgtacttgagccagaggtcattcatattctcgccgaactgcaactggtatgactctttactgtcgggctgcccggtagacggtcggatttgtgagttcttttcccacccgacattgtttggattccacggtacagttgccttgacctcgtccgatagatcgaagaaactttttgagatcgcaaacatggattgaatgtcttctttggagattccatgattgatcaaggtgaagaatccgacattctcggcggcatggatgagttgatcagtaatttcctcgatgcgatcttcaaagtcgtgcatcgagatacgtggaatgactcggtcgacatatcgggtttcagatgccatgtctcttagtagtccgggaacttcgcccatgtgcacacaataaattatggaagcttttataggtcactcggtatcacgtccaatatacgtgcatgctggacggaggggggcttcgagctgataagcaagtcgagagctgtacgcggagtaggacgtcatcaataaggtatatagatgtagagaatccggacactctgcgttgatagggcaggattatggtcgaatcaattcaactcgataagacattgtcagcgccttgaaaggtcaaatcagaaaatgtacttcaggcactcggccgagttctcagcttccagggattggctcggactaaacgctgctcacggggtatcaaattatctatatgtccaatatgtccacatgtatctactaaatgccacacacgcaaaaacaatttgggcgagtgcttggtgtcaaaacagatagtgcgcaaaccttcaagatatggctctattgaaccttgcgcacttgggtcacaggtgaacgatatactcggcgaccgtgtacaatgtacaaaacaattgcaaatatgaccaccgctccgaagacaaggatagaccaattcatatccaccagagtcgggttattggtggttgggaagaaggtgaaaatgatggcaaagcaaagccaggccaatgagaaaacattgatcggcaatccaaagataccgagcgaaaatcgcgaagggggaataccacccggttggaaacggacccgaatgatggcagcaatcggcaggatgtacgtggtgaaaagtgcagcgatcatcacagatgcgacagcattgaaagccgccgtagatccgatgttgatcaagctcagtagcacggtaataatggtcgataccaacacggagaagatagggatctgggtgcgtcgattaacgtgagccaactgcttagagaacggcaaggcatcatcgcgggcaaaagcgaaggtctggcgagagactgtggcaagaataccaatggcgctgcaaacttccatgacaagaatgatagcagccacaccattagtagcagccatcgagccggttgcatgattaactgctgggaggaaggagaatccactcgccggggcgagtacatcctgcaagtctcccatcttatacagcaaggtgattagcatcacgaaacccagagcgccgttgatcaaagcggtcgaaaccatacaccacggcaccaccaaggcagcattctggacctcctcggctaagagacattagccatcgcgaaataggagagatatggcgtttgacttacacatatgtgtagcagcatccgggcccgtccaggaaaagatcggagtcagttggcccaccagacacgcgaggcccatgctcggccattcgccagcgtttgtaaactccttccagacagaatccccagaggcctgtcctggagacatgacccacatgaggacaacgacaacaacgaaaccgaagaggtgaatggcgaggatcagaccctccattggagggagaatcttgtagccccaggtattcaccacagttccgacggcggcgatgccgatagtcagcagtgtcccatgccagcgctcaaagccatatagccaaccggagggatccgagtagttgaagactagcagtccttgaatcagagtaccgcaaaggtagcaaatactcgcaaacgcagcttgccagcctagtaccgaaagccatcctagaacgggattagcggtggagatcgtcaggttgtaattcgaggtttcggctaaccggtgagatagctcaagaatcgttggcaccttggccaggcgaattcactgacccagtgatactgtccacccgatgttggggagctggctagtcaatctccatgcgctccatgcgcaacatgcgagggggggggcggaacttacatggaggcaatctcagccatggagatcacggcggagaagaatccgacaaatgaagcaatatacacatagaccatgccggctcgtccgccatcaatcaagccgtatgtactcgtgctgcgccattctccattattcccagtgttctatcataagatcgcgcgtccaaactcacagcagaatcgactcccatgtggccatcaacgtcgttgtgaaacctaagatcgaataaaaacggaagtttctctatcgctgatcagtattgcgtccagtcctaggaaatgtacaactcaccttgaactgttgggtctttccaaggcgctgcatgtcccaatcatcctggtcggtcgcgtcgattccgacgtcctgcgacaacacgttgttggccaatgcttccttcatggcgatttagggtatagcaaatggaaaggaggaaaggcgatcagatcaaggccaaggggccccggagaaggtcataatcaaaggggggaagaactggggagggaagaaaagcgcgaaagtggagccgaagaagtctatttgctcgaggacaagtcatgctgcagatccctcatggatgaatgggctttatcttatgagtcgacttgtagatgtgaacttatagtccgtagcataaataagtaactatggcagattatcacacattgcagaatcccacattccagggatatctttctccacacaaggtcaagaaaatggagtaaatggagtatacaatatacactcgaatatgattcgatccttgcacttattaactccacagacgggaggtttcttcagcgcacaacccgctagctcatatggaacgaatgaggtgagctggagatgcattgtctatcaacgtgtacctatgagacattatcattcacaagattctagtttagacggtcgcactttactattatgttctcattttgatatctacaaagaatcgctaacggttatgattaatagaatagcatagttcaaagtacatatgttccattcatatatattcttgttgttgaatgatggttgaccgttaggtccgtttactctacatctaggtcgtgagtcaactattccaacataaccaatgcgcatgatctgttcttaaccggaagtactccgtacactcctttatattcccgacattcttccgcaatcaaattgtggttgctgtacggagtatacctaccaatataactataccctactacatataccacggcatttctaaatccgttcttcttccagttccaagataaaccccctatgttgcatgtaccgtgccaagcgcctagcatctgccgaattagatacatacccaatcggggatctagtgaatgacgaatcttggcgtcaaaatacgaaatatcatatgaattgcgtgtccttttttcatttcctccgcacgtatgttctagccttgtcttaggactaaaccgaatacagatattgagaccgacctgggggttgaaaaggaggcagagagatcggcagaagaaaagggaaaaaacggtagacttgcgattgagctccagatgactctgtatattctgaatctatttatctagttacaacatccgtggatagttcgtagaaacaaattgtcttatctgatccccaagatttgaccccaaccgccacatattaacgccacatcctcgaatacttggatgacgacgcgtggggctgatggcgttgccgttcccttcggcgcccctcggcagatattttcatcgctggttggtgcagacgcgcaattctcaatggaatttcgacccacggggagcttggcagaccatgagattcctacaagatgaaaatccgccaactcccgaatcgcccatacgcgtacgagctgagttccactgttcggatcgccaagaccgagtggttcctgcccaggactctttcggatagacggagaatcgacgtgaaaaggagagtgtcaaatataaccatgctggcccagcccctggctccgacgcaaaagactctctgtccgaatctcttgtttcgtccgggatgcgctaatgttcttgcggacttctgatagcgtgcttcgcctgagctcatggcttcgcaatgaccgtctgcatgcccgcctgcccttccgatggattgctctagttctcgccgccattgggggcttcattctattttatctatttgcgatcccacaacttctccggttccggttccgcgtcggtttaagctggtatgatctaggagctcaagggttcggtccagatcgaaattacaactccttcgatcaagagtcgcccatcgtcgaaatcaccccgcctggcgcaaaatgcgatccccggtacacatttcttgcgcctcggggcgattcagttgcccatcctggtccgatgatcctggattccactggggaacttgtgtggacaaaatggaatgagggtacgacacaagacttcaaagtacagcggtacaagggcgaggactacctcacttattgggaaggagacacatccgacggtcatggacgagggtcatggtacatggtaggtcatacatacattgagctcgctcaccacaattccggttctctaatcacatcgtccaaatacagcttgattcgacctatacccaaaagtacgtggtgtctccaatcggcatgtatgacggcgacatgcacgatttccaaatcacttccaacgataccgcaatcttgataatttacgaccctatcccgatggacttgagctctatcggcggcccggggctgggatggatgtatgatggagtgttccaggaagtgaacctcgaaaccggagaactgctatttcagtggcgcgcatccgacttttaccacccgagtgatagttattatccgattggagataatggtcaggaacgggcctcggggtatgaccactcgcacatcaacagtgtggacaaggatgaccagggccggtacctggtttcgatgcgccacctccatactgttgcatgtgtagatggcatcactggcgatgtcctatggtcgctaggaggtaaacggaacaacttcgccgaggcttcggatcgagctgccaccgatttctcatggcagcacgacgctcgctggcaaggacccaaccgcctcagcttgttcaacaacgcagcctataataatgaaaacctctcggccgtgagtcgcggcttgatcgttgatctggatacagaagcgcggcaggcaacattactgcaatctttcgagcacccgcacgatatcaaggccgtttctcaagggaatctgcaagtactagacacagggaacgtgttcgtgggctggggtcactctgcagctttcactgaattctccccagagggcgatgttgtatgcgatgtgcactttggtgcctgtgctttcttcacatttggtcgtgtcgtctcctaccgggtgttcaagttcaactgggtaggtaatcctgtgacactcccggacactgcaatcacaccggagagtgtctttattagttggaacggtgcgaccgaggtagctgaatggcgagttgaggcatgggacggtgaagacctcggaaatatgaccttcacggctatcgaccaggtccctcgcgacgggttcgaaactgaaattccactgacctccaaggttgattcattcttccgcctgcgcgcaatcaactcaaacggagagagcctcggtgtaacagaaatactccagcgactaccatcgcaaggctctccccatataagcacatgggccctgggctgcattgtgtttgtggtacttggctgccttatatgcggtgtttactatgctgttcaccgtcgacttcgccagggatgtaatcccagtggcacgtatcaattggtatcatataaggatgaaaaccagggcgatgatgagtatgatcgtctaccattataggacgctggagttctagatacccgttctgcctgtacataacttggtctgcacatatttacggatagattcccatatatttgcacattccttcttcgcgccttttcttatttgttgccggcaggaatgtggtgaggatattccctcgctgttattccgaaccctgttcattcgtattgacgtcaccatatctgatatcaattcctcggcaagtgacttgaatctgcaggtcccgtggatcgtgaagcccaatagaacagggaggttgcggaggttcttcttcgcttccgctcatttcttatcaaaactcatttgccaaggctgtcaaaaacctcgggggaacgtaggggtagaggtgtgagactcgatttcgtggccgacgtgattccggatatcttgcctatctgagatggggcagtgctttaccgtttgagccgtaaatatgccaagaccggaccaccttccgactctctagatgctcatatgtagggtatgcaaatgatgtttgccaaaccgaggctcgcccgaaaatggcgcgtcgtgatggagaggactccgagaggtgcccttggcgccaagggtcacctgtgaatctgatgtttcagttgaggggggcgggtactcttggcgccgctcgcagagtcccgctcctaagccaagccgaggtctcaacgccggtcacaagaatttcccgagcagtactcaagcaccgtttccgcccctgaaaagccaccattgcttcaataccatccgattcaccttccatgatcaaatcgctggatgtatgattggcgaaagaaatgcctcttctccaccttttgtcgccaggatcaggatgataacattggatccttctcggcgaaggaacaattttggactcctgactcctcgaggtcaaggccaccgaagtgtcctaggcatgagtcaatatcgagtcatgaccttcagtcttctgtggctgaactaggaagtaggtacatgattgttgagatcaaggtatcaaggttttatgagtaccgctcaattcagagtctcttttgacgtagatggcatacctttctgtctcaccattacgttctacaattcctgtctggtcggttcgaaaccagctcattcttggctcctggccaagccctatagctatagccacattggcatttatatatctccttggctgcttctcagttattgataggggaatcaaaatctggttttgttgactacggaggagtgaaaattcagcagaacttttcactatagccatgaccaagatttggcattgccctactccgtagttcaattagatagtgaagtggatcgatccatgtacgtcgctttagccagtccacactttgtaactgaatcccatgtgcccacatagtagctttccccatgggtactcgttgtagcgaggaggtatgagttggaacccgactaacttcatttagaaacctcccagctcccagtcaagcaaccgtggtctgcttatctgcattgagggtagtactgttgccatcggaacgttgatctcatactggattaactttcgagcttcctatggacctcctgatttgacatggcgcttcccaattgctttacggtgcgttttcggcctttttcttttctaagtcgtgggccgccgaaaactggggttgtggttgcctgggtgtatagcccacgatctttcttttcgacgggaaacgcaggtgtcactcttttgtcttgttactacaatagtatactttatataattatttttgattctagggttcctttaaatggaggtaaaaaaagaaagcaatgaccgcgacttgaacgcgggacttcgagatttgcacttgggatgatgttagtattggggcgactaatcactttagaagcgaatatacatacatctcacactctaccactgagttaccactgcaggtgatgatgaaacgcaaagataataaactataatacgctaatccttaaaagaagcttatgtctttcaagctttagtcgttacaccacactcagcaactattttgttgtccataatcaacctacgggaaagcattttgcccagtttaacaacttttcactaattttgcttgacaccaactctgccttgtgacatttgccattatataaaatagagcctggccacgccactcgcaagtgggcatattactacttgacagtagtaaagacgggatttaccctccgggcatctagtgttagtacccattacctctattcctgccatagcctcactagacaggactaaggcccttcgactaagactcgccgaatttgcctaactgggagatgaaccaggtcagtcgtagaagcaagtgaattggctgataaagggattatgctattgcttgtcactttcgatattgcggccggagctgtgcccccggtacggccaagatagtggttattggcatagtccagcagccagagcttgagagtttcctcgtcattccctcacatactcgatcttgagctcttccttacaaattacaatcaacctagacatcaacctagtccacttaaacctatttttaggtccgtactacagtctgcccgactacaaactggaatgtcacctattaaacaattacatcgacgtatatacaaccctgctcccacctccacgggtgctaagatttttgttgcgtcactgtaactcgacatttgcgttgggagtggagacatcagacgggacctggggactgtcaggactaaacctaacagcgtaattcatcgtacccggcatttatgtgtagatcaaatcacgtaaaaacatcattcatttcctttgagcacccggccactcatccggtccttcggcttggggatgagagccctacgcggatgaatcatatcataggttaatcattttgagagttgcactaacaaatgcgaagttagaaagggagagagtaaagaatgatctcggtactggttagggctttgtgtcaatattagcccccttctgatgtgttgttggtaatagatagaggggtagagaggggtaattttatagacaggcctgcttcggtcactgtataaaatcattaagacgaccctcaatgaacctctcgattgatcagttaactacttgcgtaggtatatgtgtacgtaggtagccatgcttgtggaataaagaccaagtgctttgagcggcgatatgagcatcaaacgacatacatttctaccttcccatacatcatattgatctaatctaaaacttttagcttagcgctagatatcatctccagggctataagatcagtatttcttctcgtgtcaaattcgtccattccaataacaacatttccaaggcctgtgtcctgtctaaagacttctcaataaaagggccctcacataggttgtctcccccaatcgtctgccctggggaggtatttgattgagttttcccatgtgatgtgtttggatagattgccggtgggccgaagtctgatattgctttgagcgcatcgtggatccacggcacatttgagggttgatcatcacaagcgtcaacagaaattgctggtagcgctggtagttttcgaggtgtatccttgatctctggggaggcatagccttcttcacttatgtcttcgaatcgtggccgtttgagggcggatcttagttccagtcgctcgagaactccttcgccaatattcgttactcacttgacctcattgttcttttcctgccacaggtgcttcccattggtcgttgtgcgagaacctggcggcagacgggatcatccggagttttatcggtgtggtggactcggatatgtctgcaacgggtggtcaatttaatagtaagtgatcagttttgtcccgaagttttattcttttacttactaatgaagatgatatgaactgcgggttcatcgcacagacccgcgccgctcaaaccgtccagaaagcaatgaaccaggtcaacaaggctcgtgaccgattcacatcattggttaaagaaagggagggaatccaaagtgaagtctaaataggtcatggcccttgtaccagagtgggaggatatccaacaggataaaagaaatcgggaagcagctatgagattactacaaatctgagatcaatataactgaaattcgcagtgatttcatagaatcctcgctaggtagaaacagacaacccgtttagtgcatagcccgtttcatcaagcgatctgatggtctgacgttgcttccttcgccatgtaatgacttgcgtttcttgggtccctctaggtcaccgggaacctcagcttcaagcatgctgagaacttccgcgggtttctctgcttttaaagcaataacttgctcgttccttctctggttttctgggtagttttggtaagtaattacagagggcatgccagacctaggcgtgattgaaggctcaccatttccgccctttccaacctcgtgactaggtccatgctcgaaatggaaacaacccccagctatttccaaggcttgttcatctaagctgagacgatttgcgaatgattgtcgggatgcttcagggtcctttagagttttgcaggctggcaagtgtgttgacgctgaaatagaggttgaacgaccagctatgcttccaactgatgaggtatcacaactttcatcgaggaatcgctcccaccaggactctgcgatgatctcagtgtcgtcatcagaattcagttgctcggtcttaaaatagctaagttcttcttcaacgtgtatcacgacagggttggattgtgagcctagcggagcaggatcgtcttctatcacgatagtattggctttcgtgcctaggtccgaagaatcgatagaacccagtctgaacgcttttgagaaagttagcgtggtgaaaaaaaaatgcttctatgagatctctcaccgaaggcctcgtttgtgttgttcccggaggattccatgctgaagaagcgtttgttgatcaaagattgacttctgctctcttgttctattaagaatttcgtgcgaaacaagtggctttatagctcatgcccgatcgatcacgccttgcggattctctagcgcagacagcgaaagtcgcaaggcaggatttgattcaaacaaactctgcctgtctgtcaatcgttcccatgcgcaatgcatgaagtatgaactgccgcatacctactcatccatgtagtccaatgaacatatcgaaagatgttgttcctattcttggaagccgtaggtctgcatatttttgcgcccagaggttctaagcctaggttgatcatatcctgcttgccaatcattctgtgacctgagagataagacagtatgatcccggccttgttcgttcttccaacattctgccgttacatcttaaaggcagatttggggacccgctccgttgacaattaaccggcgaatcggtgtgtgaggcggcaggtcgcaggtcaacgcagcggactaaaggcaaaattgcctcatagtagtcgtactggagcaatcaatcatgatatgtcaggccgttcctattttcagggtgatgcatgtctgcgctgggctagagcgcagtgttcttccaccgggccgactgggtcctgcttgccagtcgttcctcgatcatagactgaagaggagacgagactagcgcactaggccggagacgagaggcagcctcgtcgtctccagtccgcgtgacgccgatgccgtaacagtagacctatttccgggtccctccatatcatcctatggaccaatcgattatgaggttgatcgatggttgcgctgataagccgaattaggtgactgggggccaagcctgcgcatatctcctgaataaccgtaagggaaacgggtgtaggtcgggggggtcgacatcttgcacgctacctaagccgtaggcgattttgtatggtggtctgcaaactgagcctagagaacatcacggtcaggtcatagatcgttcgtgtcgtaatatttggggactccgcatgcactggccgaaaggaatcgcggctaggacagttctatcggtcaaataagccaccttggtcccaagtcaatttcattttgaaaatcaagcgagagctatccctcaagtgtgtcaagaccctgccgttccgttctttgtatgctgcggtgaattcgtagccctggtccacgtaggcgattgtctaaagcgagcgaaagccgcgccgataacgggaccaacgattgaccgacagataatcacattaggacggggaattcgtgggtcagcatcagggcgtaacagaaagcacctgattaggaatgaggggacggaaagttgcgtataggttacgagtcacacagggaaaaggggggtggcggagctcaggagctcggtgatccggatcaatagcaaaaatgcctcacctgcaaggcccagggattacccgggagacaagggcgaaaagaaaaatgacctgggttatttgttgggtggtggaacaggggagtatatagaaccacgcacggggaggcatgaggacaaagagcgctaaactgcaagtggacaaactaaactataaagcgtaattcatcgcacccatccgatatggtgtagtggctaacatcgccgtctctcacacggcagccgggggttcgattccccctatcggagtttattttttcctgacataggcttccacctcccggtttataccaccggaggatttgtcacgagatcatttcatgagacggttttgcaagttctatctatcttaagaccctggcaccgggcttccattcagccttctcgagcccttttgtgatgcacgagacatgcgctctcgtgattggcccaattctttttctcttccatcccctcacttaggcacgggtctctacagcaatgtgaaagctgtcaggaacatgagggtcggttcacccattgagggaccgaatcgtgccatacaccacgttgacgctagcgagggtctggagatgctcgaagatagcatttgtggccttcgaatcaccgagaaagagcttcagacagaggcagctgaattcggcgctttgctgaaagacactacgaatcgatttgctgcattgagtgaaatgatcgaatctcccagtaagagggttctttctgtctccagattctatcgatgatagagagagactccggagaattagggcaattaataaactatctactccgtagttagtacttgcatcgggcagtgaaaaaaaaaaaaagaaagggaaaaatctggcggtgagccaggcggtcaaaatttcccatgggaggtcgcccagtacggagaacaaccttcaaaaccccaagcatcctgtcgtggggtcgtttcgctcttcttttcgcattcgacttcagtagcccgctgtcaagcgggcgtttaggcgcgcaacgttgattcctacagtctaaacagtggagatgacgtccccacatcccaaggacatcgggatgagttccccgcgcgaaaggtcgcagagtgttgcgtctctgaaaccgatagagctttcagagacagaacaaagacaaacacaaccagagactagagatcgaccacagtcgactacagaggttcaacagccaccaagcactgggtttgaccctgctgaccgtgtgttccctattcggtcggttgtttcactcgatcccaccgttacgccccaccattcgggttcagtacactcccgggacacgatatcaccaacccgagaaggggcgcgacagtactcattcattgacgaagggacatggaaccaaatgcactcgcagcgttcttccgaccacctttatcaccccgatcccgaacacgccgaacctaccatcccaaccggtattcctcgccacgaaacgcatgctatagatggaaaaacagaaatcgcgacacattctttagcatcggaagttgttcaacaccccgaaatttacgccaaacctgccccgagtgacaaccagtctggaaatgggtccaccgcgcctccatcctccaatacgcaacgcagaaacgccgaagaccatgttcatgttactgcccgcttcaaacatgtcatgacggacagtggccatgccgtcatcacaggacgagatgggggagcatttcaatattgcgaggatgagcccattcgcatacccggggcgattcagagctttggcttactgattgccctccgcgaagagtcgccaaatcagcttatagttcgcattgtgagcgagaactcggctgacttcttgggttattcgcctaaacaattgttcgagctgaaaaatttctgtgacattttgagtgaggaccaggtggacacactcttggatcacgttgactttgttcgtgatgatgcacacgacccatcaatcgacggaccggaggtttttaatatgtccatccgcacagctaatgggaagcgctgcaaattctggtgtgccacccatgtctctcagacgcaaaaggatttgattatctgcgagttcgagcgtgaggatgacgaggtgaacccattgaatgtcgcgggccttgccactccggcagtccccgcagacaccctaggcattattccaacgccagatcaactcgctgcgagcacaatcaacattagccagcctctccgcgttctcaggaatgcccgccgtaggaggggcgaggcatctccaatggaagctttcagtatcttaactcagatacaagagcagttagggcggacgaataatctagaccagctgcttaatacaactgcaggattggtcaaggaactgacaggcttccaccgagttttgatatatcagttcgatagcagctggaacggcatggttgttgccgagctagttgatcccaacactactattgatctctacaagggtcttcattttcctgcatccgatattcccgcgcaagcccgagaactatacaaaatcaacaaggtccggctcctatacgaccgcgaccaagtcacttctcgacttgtgtgtcggaccttggaggatctcgaattcccgttggacatgacgcacgcctatcttcgcgcgatgtccccaatccacgtgaaatatttggcacacatgaaagtccggtcttcaatgtcaataagcgtcaatgcgttcaacgatctatggggattgatctcctgccatagctacggaaatgccggtatgcgcgtgtcattcccaatacgcaaaatgtgccggctcctcggcgacaccgtgtctcgaaacatagagcggctttcatatgcctctcgccttcaggccagaaaactaatcaacactgtcccaaccgaggccaacccatcaggctacatcattgcatcctcggatgatcttctacaactatttgatgcagattacggtgttctgtcgattcgcgatgaaacaaaaattcttggtgacaacaataactcccaggaggtacttgcgttgctagagttccttcgcgtacggcatttggattcagtgcttgcctcacacgacatcgtcaaagattttcccgatttgtactacgctccagggttgaaggcaatatctggtctactatatgtcccgctctctactggaggtagtgacttcatcgcgttcttccgtcgtggacagttgacagaaatcaagtgggctggtaacccttacgaaattgaaaagcgaaagcaaaccgcgggatatctagaaccacgcgaaagtttcacagcatggcgggagacagttctatcgcaaagtagagagtggacagagacggacgtggagacggcggctgtcttgtgttgtaggttgtctccttgagatatcctaaatattttgcctcgattctttgaagactgacataccttgaacagtggtttacggtaaatttatcaaagtttggaggcagaaggaggccgccatgcaaacatcgcaacttactcgcctacttttggccaactctgcacacgaagttcggacccctttgaatgctatcgttaactatctagagattgctcttgagggtgctctggatgatgaaaccagagagagtttgaccaaatcccattcggcttccaaatcattaatttacgtgatcaacgatctccttgacttgacaaataccgaaaaaggccaggacctcatcaaagatgagaccttcgatctggaatcgacctttagagaggcggctgatatgctgtctggcgacgccaagcggaagaatatttcatacactgtttcagtacatcctggtattcctgagttagttctcggtgaccagcgtcgtgtgcggcaagtcctttcgaatgtgatctcaaatgccatccaacacaccaaatctggcgctgtcacgacagaaatttggcgctccaacggtcaaaccattccaggccatgtgggagtggagatgacggttgttgacacgggtgtgggcatgtcgcacgacaagttgcagaggctctttcacgaactcgaacaagtgtcgaccgatgatacctactaccccgaagaagaagaagagaacacgcagaacctaccgcaaaaacgtgtgttgggtcttggtcttgctcttgcagcaaggatcgtccataacatgcatggtcagctcggtgtcagatcagaagaagggaagggcagtcgtttcaagattatattgcacttccgattgccagagggaacaaccgtggacgaagatgcagatggaatgtcccctggtgttgccattcctgcgacgcctatgctttcagacaaggagtttacactggtttccggagcacatgaatctcgtgatgccagacgacgaagttctgaaagccttcgtagtggtgccagttcccgtagtggacacagtgggcgcagtgcgagaagtcacgccgatcgactcatcagtgccatgcaagagcctcctcttaaaaggtctactagccaagatttggatctgagacggctgaacctttcgtcgagtcctgccagcgccagcagcaataatgttcatcctcctcttgcatcaccatccgctgtaaagcgatcattgactatgcaggatccgcattcaagtctgtcttcggtcacgcataccccgccgctcatgttacagccgcttgtcagcccccctcccccaggtctggaaaatatcacggactcgggagtgccgatgggtgctctgcgaatgtcacaacattttgctagtctcggatcaccacccatcgagcccactaaagaagataactcatacttccccagagtttcatcaatcgcagaaacatcacaagctccctcctctgggccagcatcatctgccccagcatcatctgccccaccaaccaccgtaccttcaacaacagactccgatcccctcagtgtccttgtcgccgaggacgatccaatcaatagcaagatcatacagaagcggttgaccaaactgggccacaccgttgagttgaccaacaatggtgaagcctgcacgattgcttttgcctcagctaccaaatattttgacgtggtgttgatggatattcaggtatattgaaaacacttctcctatctatcttcttcacggtcactaacccttcccagatgccaatacttgatggaatgagagccaccagagcgattcgcgagtttgaatccaagacacccaaggaagcgctctccgaaaaagctatacacaatgatcgagtacctatatttgctgtgtccgcgtcattagttgaaaaggaccgcgataactatatcgatattggctttgatggctgggtcatgaaacctatcaattttgctcgtttgaatattctattgagcggtatctgcgattcatccgcccgaaaagcagccacatacacgcctgatggggaatgggaaaacggtggttggttcgacaccaagtaacgaacatttggtcgttgaacggccgtccttaaattctgcctccattctcacctttcctatcatctcttgattacccttgacccctgctcattcccaaggataggtccacacgcaaagctcagtccctctttgtccccagtctatcgtggttcgagctttttgttccgcgggcatattccttggaggtttgtgccccatttgatgatttccttctatctacatgacatttgtttatttgcttatgccggccgcggtacatgaaatgggcctgtgggattttacctggcgttccttgtgacttctatatgtaaaatatacggataccctatacgtcacatgtttgtgtttattttcatgttcttgtcatttttcactttattttcgcttttctttctatttactgttcatctcaatgtcgggatgtcatgacaactagttgtatggtcgagctacgttgaggtttccttggcgatgtaaaacgctgtcgccaagcgcaatatctgatgccagcatacagagacccactggccagaggggactagcacagatatacaacatttcgtccccagtctcaaccctatctgttccagcggtgctttcagcgcgggatgagtggtgctggtcgcataggccaagcttttcaagacgagccagcccctttgagagttgcgtttcattcattggttaatgcttgtatatgatgcaagtggtaggtgtttcctcccgtatttagaagtcgagttctcgagagctccctccgcagtctcctggagttttaagactgaccggcgagttgatggcagcgattttgatatcttgttcaaatgtgctgggacaccgcgcaacctccccaaggcctaagcccaccgtcaccataccatctagccgtttgtcatgcgagactgcttgaccacggaaatgtgctgccgtgatggagccaacttgcacatagtgtctagacgtcgcgtttctgttttctgtacaagttttacgtcgcagtatcctgtcagcatgtcggcaatagtccaagatcgattgggacataatccatatgcttgatggtgcacgtaggggtaagtaagctaccctggtgagtatttttaaccagtcagagtgtggatcttgatctgagatatagggaattaattagacccagtaagtacggagtaaattctaccttatttgcttcatttgcttcaccagtcttggaaataaatagcaaaaagaaagcaatgaccgcgacttgaacgcgggacttcgagatttgcacttaggatgatgttagtattgaggcgattagtcgctttggaagcgaagatacatacatctcacactctaccactgagttaccactgcagatgacgatggagcgcaagtataatacgctatactaggcttaccctttagatgaagctgatatactaattcccatcggatatattcattgacgacacgtaattcttacacaaggcccggggatagaggacacggcaagacttgcggaattactacgagatgctgggatcccatcggctctctggggggactttgtccgttggtatgtcgttcacagcccttagtattgatttaccgacgcatacgatattggccgtcagcttctatctgacaaatctgccccttgtctagacgacactgaaaaatagtgtgggctggctctctgtgatcgacgtcccgaggtcgcctacgtatctgcacgcctatatatgagctcccaaagactggggattcattcaacgactcgtttcatctatttatcattggatacaccgtagaccgagtgaattcagactctgcgtatcttcaattctgatttggttgattataaagcacatgaggcagactagactggaattacgtattcactttggtgcgattgagagtgcagatatatagacataaatagacgttgcagcccggctcagtataaggttacatggacaggatcctgctcatacccgcgtatcaactcgtgctatccacatcgtatcctttagctcacccgcactataagcctgactcatagcaatcagtccttccgagttagtatactcgtctcttttataaaatcgtcctatagtatgtaaatagaacagcttactcatcatataggtgccatggtctagtggtatgacgacacattgtggtacagcaatgatctgtgttagccccggttcgattccgggtggcgccattcttattttttttcttcccttttctctctcacttttaccaaatagtagaccagtcaaaaccgattttctgctgtagtgtaataatctaagagaaggaaaagccataaacctaagaatatatcagctttacttgatgtagccaaaatttgtcgccatttcatctttccggtgccatggtctagtggtatgacgacacattgtggtacagcaatgatctgtgttagccccggttcgattccgggtggcgccattcttattttttttcttcccttttctctctcacttttaccaaatagtagaccagtcaaaaccgattttctgctgtagtgtaataatctaagagaaggaaaagccataaacctaagaatatatcagctttacttgatgtagccaaaatttgtcgccatttcatctttccggtgccatggtctagtggtatgacgacacattgtggtacagcaatgatctgtgttagccccggttcgattccgggtggcgccattcttattttttttcttcccttttctctctcacttttaccaaatagtagaccagtcaaaaccgattttctgctgtagtgtaataatctaagagaaggaaaagccataaacctaagaatatatcagctttacttgatgtagccaaaatttgtcgccatttcatctttccggtgccatggtctagtggtatgacgacacattgtggtacagcaatgatctgtgttagccccggttcgattccgggtggcgccattcttattttttttcttcccttttctctctcacttttaccaaatagtagaccagtcaaaaccgattttctgctgtagtgtaataatctaagagaaggaaaagccataaacctaagaatatatcagctttacttgatgtagccaaaatttgtcgccatttcatctttccggtgccatggtctagtggtatgacgacacattgtggtacagcaatgatctgtgttagccccggttcgattccgggtggcgccattcttattttttttcttcccttttctctctcacttttaccaaatagtagaccagtcaaaaccgattttctgctgtagtgtaataatctaagagaaggaaaagccataaacctaagaatatatcagctttacttgatgtagccaaaatttgtcgccatttcatctttccggtgccatggtctagtggtatgacgacacattgtggtacagcaatgatctgtgttagccccggttcgattccgggtggcgccattctttttttttattcttttccccatgatcatagaagacagaccagggccgagtaattattaggtaaggcttcttttttgtaagcttttccaggtcgaaagtcatatattaaccagacatcatcacatcgttcactgatgattccatgcaatatacaatgttgtatagagaaatgagggggaaaggagtacggattttgatggggtatggcgggcagaactacccgtaggcggtaggagacaataagccaataagacagcccaaaacagcccgaaggcggtctgaacaccataatctttaacaaagtcctgcaaacaaattcatccatgagtgacatgaggtgatactctgtgctagtgtggaggttagaaaaaaaaattggcgccacccggaatcgaactggggctaacacagatcattgctgtaccacaatgtgtcgtcataccactagaccatggcaccggaaagatgaaatggcgacaaattttggctacatcaagtaaagctgatatattcttaggtttatggcttttccttctcttagattattacactacagcagaaaatcggttttgactggtctactatttggtaaaagtgagagagaaaagggaagaaaaaaaataagaatggcgccacccggaatcgaaccggggctaacacagatcattgctgtaccacaatgtgtcgtcataccactagaccatggcaccaagaggctgaaatttgcacaaaatttggctatatcaagaagcgcatttcatctagtttagcggcagcgaactgataggccttggctttcataagggcctcatttgcgagcccaaaggtaggatcgcgtttcattaacatggtgctgtatctgacattagcaaggcgtattgtctgcgcccgccagtggtgagcaagctgtggctccgcgaaaagaaaaaagaaaaaaacgccgtgttagctttgaagcttcataaaaagatcacatattcaaggagtaggtcacctttcagaaacttcttgtgcatagtatgtaggtgagtgccgaaaggggccttcgctgttcaggaattcacaatcggcatccaaatactagaaagggtttgaccagaatagtctcatgcaatctttgataatgatcatcgatgcaaagacacgcagaatgttgtaccgtatgttaggcgggggctgtgagaccgttctgtcgaagtcatcttgaacaacccaaccttttaagctctcaatgacatctttttttgctcttgagataagctttcacacctgcttcttctggttttgttgcaatagtatgctgcccaagattcacactgtaacgtttgatggttgagttcaagttcccattgggccaaggggagttcgggccagcattcgtaacatccgttcaggaactgtcgatcatttcggagagaacggatattagtccagcagatttcaagcgcatccttcagctcaatacatttttgttgctcttcaaatgttagagccggtttgacagagtcttcctcatcttccacccaccaaggaatctctccattctcccttttgatcattttgatcattttaatcatttttccttcttcttcttcttcttcttcttgtatgcgattccacccctaacatccatctgctgaggtttaggtcagaattcctagtcgggctttggaataaagatctcacagtcttgatgggggatttcaccaccggcttggcaacttccttcagaactcttttgtcggctttactagacatggttgaggggatttcgaaatttctggagatatggtaagaaagaagcaactgccatggaagcgtagaagctatctaaaaccgtggtgagatcaagacggtttggtttctttcaaactcgtaatgattttaaatgatacagggctgatcccggagatacttttctttgtttaaaaggggcgctggatacgccactgcaaggatatctgtttcttcccgtctgttatttgcaaaccagctcttcgctttgttcccaaatggattttcttctttcttcttttatttccggtcatagacgagatatttgagaagcactagagggtcaagagtccctttgaaagaaagcagaagtgaacaaatgggaaagtgtcatatgtcatctcggcccaatttccaacagaactactacggctccggttggtggttggattattatctatatgcctggcccaagtagatgatataatctttctgtgatttcttgaaaacatggggcgcatagatcgacgatggtagaagtcacctctttttggaattgccagataaacacatagaaagtaggtattaaaccatctagaatatcaaagaaacaaagggtttctgcggccatcatcttagaaacaggttaggtttggctcaacgaacttgtcttggaatctgatagatgaggtgggttgaaacaagcctaggtttcgcttctcacaaaatggttgattcataggtcacgacttaaatggagaattccagaaggtcactcgggtgaatccttgttgccgtattctgtcaatattctcaacatcagtgccttcggtttagatatgaaattaccaacttaatttgtagccctaccatgacagcttcctagccttaatttactctatcgacccttatagattgctctagtctttgctctaatctcctagtcatctgcatcgcggaagctaatgatctatgtcgaaggttatacatagaaaagtcttcacaatgctttttctgccgtctacctcaaaaaaaagcagtatctaaaaaagatctacatctgaaaataccacatagacagaggccgtattcaaacgagtaaatgggtactcaaatgtcattgtggggtaatttaggtataaaaacgccttccctacatcaatttcctaattagggcacgccacttgatataaatctgctggttaatcaaaatgtaacataggaccctgaaagacggcagtacggtaaaaaaagaagaattggagattggatgctgtggggtgatgacgacatataaaaaacgcactagtctggcgtgacgatcccaattaatataagtagataggaagtaccgaggctgtaatccggcaagccagtaaaagtacgccagcccgcacgagagtcactcgggtggctttgggtctttcggggtcttgaaacacgggaagctgaggaagtcactgtaaccctacgatgtatgtatacctacgatctacataaaggattccagagttggcggcattttgcgagctgatcggaaataaacagtacagcactagacaagatgaaatatataaatcatcaacatctgctgctcaaatgcataacctccccaaacccactggatcataattccacaagttcaactcccaaacgccagcatgtcgttcaagctcctgcttgccaccctcccagccctggcatttgctgcctgcaccggtcctgctgtcaacaccaacggccttgatctaatcaagagctttgaatccttccaagcaaacgtgtacgatgatggctacggcaatcccaccatcggctacggccatctctgcagcgactccacttgctcggaagtgacattctccaagccattgaccgaggatacagcgagccaattgcttgccaaagacctagtggtaagtctctacaagcactcttcctccctaaaaccccactatgtaggtatctaatgaatgtactaacccggaaaatagacctaccaaaatggcgtaacaaacgcccttgccaccgcggttactctgaacgacaaccagtacgcggcgctcgtttcgtggacgttcaacgtcggcgtcgggaacatgcagtcatccagtctagtcagccgcatgaatgccggtgagaatgtggagactgtggcatctgaggaattgcccaagtggaataaagccaatggggcggttgttgctgggctgacgcgccggcgggctgatgaagtgaagctgttcgaggaggcttctcagaccaaggctttgcctgttggctgttaagtcaggacttgaataggtagactttggctatcttttatcattggaggtagggggcgatgcattcattgttgattaatgaatgcatacatctactttcaatgaagttcgatgtttatcttcggcagctttgtttgttccttcatacttcttccggggttccaaggctgttttctcaagacatttggatctaagatgaagacacaataaaaggggagttgcgtttatattttatatggatatcttcatataacatcagttttcaagtaatttcatataacagtttcctggtctagcggttatgattttccgttaacaaatgccattagctgatgttccggaaaggttctgggttcgattcccagggaaactattttttatttttatttttagataccatgttgctaagtttaggggtgatatacggccgatttgggtctagtggcactctgaactataaagcgatccttccaaggttccaatgaggctgagcttttttccgtcctcaactcacctctgaaccatcgcaacatcctaagtcgacccatcatgtcgctacttcgaaagccgctaaagcaatacccttggcttccatggtccattcgtaacatctatgactggctccattactctgagcccacctggggctatacaatctaccggacgacctacactccccaatctaatgccgctttcccgcgtatggtcgacctcaccacgaagtacatgaagaacggattctacggggaatacgaaccatcccttcgcgaaagatccaatgcaaatgagttcaacatcactccctaggatgaaatgtggcctaattaccagccacaggtcattgaagatacttcccagttcgatggagcatcgatcgaccagctccgcgagcatttcagggccgacgcaattaagcgtggtatactcgatgtatttcctgggtatcgtatgtttattatcattgacgaagaaagtttccaaacgttacaaaacgctccccttccggagaactcgaaatacgaagaggagagacgtcattatgtgaaactcatcgaggcgttggaggtagatctatatgaggattttccagggtggatgaagtgttccctgtcctcgttgttcgaggtatggtcggatatgcaggacacggcttatatgaaggacagttattcgatgagacccgacggtactgatgttttgtgaatttttcatgtcatgtgggacttgaatactgcagtcactatacccaagattcaatagctgcatattgtcggctctgcgaccgagattgtttattgcattgaaccggtagattagatagcctgtgtactcccgaagttacatgctcctcggggtcgtcctcgtcgacgtgcacgaagggggtcctgtactagaagggaggggtcaattagtggagcgtcattaatactatataagtgctaatgctaatggaaaaggtctggttcaagtgacttattcttatcgttatactcctcaataatgtgaatatatggaaatccagaagtattcttcgagttatagtcacagatagggtgaattagtggcttatctttcccttctggtagatatcttgtgtaaacctcctttataagttagattgtatgtactgagacccgatttacaagaaggcggtaaagtggtggaacttacttctttagcctttaaaccttcggtatattaatcctatactttagctttatgtcacgattggcacttgcgggactcatactttcccgttcgggattgtaccgttggtcgttccttcctgttcgagggaactcgtttgcgcagacagtcgtaccttccttctgggataaacgaggatagggctttgcccccgaagggttataaagaccccattgttgtttaacgtttgttttcttttctttccttctacatacttgatattcgatgagcaatgcacttcttttgttagaaagaacctggcacgtcacagggcttggccaattgtattcagatgcatggtacccaaccccaactccaagtatgaaaagataataaggggatatatccacatcaggaatggatggaataagtcaatgaatgtctagaccgaaagatctgcgtaagggagccaacttcatctacagtcaatttgtgcggcggtgtttatttgtcagtgagaatctacttcataccccatatgacgtgacatattccaacgtatgaacctatagccattgccgttaaggccaacgcatcaagagtgtcgagtgaataccaagccctcaaatgtttcagcgggaatatcaaactccttccgttctaagtccgactaagtgcctgcgcgtggcaccccagaagacctccacttgccaagaataaaacctggttagtctggacgtgtagcttcttctgcgagttacattaactagcgagaaaatcggtgtcggcataggaattactcgattcggaacctatacggggtttgatatggagttgagccttgccctcacaacgactctacatgtatatcttccaatggacaggggttaatgctcagcatttactattgtcgaataaacagagattatcaattagtttagtcctacgattcctattaatagagtataatgggacagaagtgacttaattttgttaggagtttacatacgaattgtaggtaccaattgtcttcctattattatgaggttcgagactaaggcggtgtggagggcggtaagccgaatcccaaaaaatcaggcaggggggtgtcggattatccaaggggggtgtcccgttaacaatcccctaagtttatacctatattctactttgattttgtattcttggttttggttttggttttggttttgttaggtcgtaaaattcatacaagtgaccgagatatatattgtcaacatgtatgtgatctggtcattattttttcagtcttgactcttgaagctgtcattagagtcattagattggccagttaatgcattgacatcccttcaccatgctatatactcctccatctttgggggtctcgccagcgagaaccacccaatcttcccccattcaccaccacctccgcaaccattctcccacgcgcccccagaacgtgggcatatcttcctccaccctgagtaccccacgcagtggggacttcactcgtgggtatgggcggccgcggccacgacgacggcgagacttgcccgaggcactgccaaacttatgcttggcaatttggcggttgcacacggcaagctgctcgttcagctcccgttgcatttgctgcaagccgtggtaggtcaccagcagcttgtggaggtcatcgagcgctggcttgcgcttcttcctcgcctggatgggaaatgttagtttcatagaatatcgactggttcaagggaaggtcagggctcacccgcgaggaatcatgctcagctgagcgctttctcttccttatgctcgaaggctgtcttgagtcagattgtgcacgtaggtcagtggacattgggttgagactcaccaataagggctgctcgtactcactcccgctggtatccatgttgtcttgtgtgggggatacgaagagagaggtgaacatgaagagaggatacagcaatcttgtatgattttataccatgagattataggcactgcgtatttgaatagccattgtccttattgtgcaggaagatgacatagggtatcaataagggcacaacaaaaccatctctgattcaccagaaggacaatgagaattcaatagatgataataaatgataacaatctcattggagagggagattgttgcctgatatcaaattaactaaatagaaaaataaagaacaagtgatgaaaaagtgagagattcaccaaataaatcatgaatagtatagtcgagggtagcacatgagacgaaggtaatatcatgctgcttgcgcttccaagcaggtctggatattgaaagtgttcgaaacccttcgtaagagaaaggcagagagagtgtttgacgcatttcgagctctccgatcctaagctgccacaaaagaacacgatttgccatcttcacaccctctactccatgggatcttgtttactcacacctacgtcgattccatagcagccagtcgccccgagcttcttaatcagcaggcttggaatatagccaggattcttcgcatggtacatcgtctctgctattgttgtacggcgagttcagttttgcggatattcggggtttttcgaccgttgcgatgtttcactacggccataaagctccaacacaaggcgagaagaatccaccatatttctactatcagatatacacggtttttggcatcttggcaaagtcctgtgaatcgtgtattattgttgatcatgtctaaaatgatatcgctcaatgacgctcccgtataagttgtaagtctatgaaatgcagagtaaatcccaaacgctaaattttcgctgataaccccgagaagaaaaaaaagaaaaaggcagaatcatgacacatatagaacaggaaaatggtgaaaaatgcaaataactaactagaagctgaacagaccggtgcgctttttgccgtaggggtagacaaccaaagccgcgataaacagcccgactgtgataccgatcgcgacttggatcatgccgaaaccaagactggcaactgaagtttcagagagagagctggaatatgaactagtcccattattttcaaggttctgacgaacctcgtcggcgtatttgatgcccgcaatcagagagccactagaagcaaggccagaggggaccagcacaaatataccaggaagaatggcggtggcggcatggccatgccagagccgactgtacagattgcctagcacaccaatagtgaatgcaccgacggtgttggcgacttccgattgggcgccgagtttggtcgtgctgaaatagttggcgacgtacccggacaaagcgatgaaaaccatgacgggcatctgctttaattttccatggttcacaatggctaggaaaatagcgtagacagccacgaaggggaatgtgcgtgcataaaccgacccatagacatccaggcctgaacacgtagatgcagatgtcgcattgccatccattagcccgtagatcgtagtccccactgtaataccgtagcccaaaaagagggagtagataatggaatacaccatacggatcgaaccagcgatgatctggtgagattgcagctccagactgctacaaaggaccatgaatccagggagaatcagagcgatagatgactgtgccatagcggagaagcagaaaagtggttcggatttaccattgcgggtaaccatgatgctgccaaatgcgcgggcgaggaaggaagtcagaatagcagcagtaacctcaaagacgttggagtagagagttgaccgtggggcgagaacgtgctgcatcagtccaacaatgcaaccgagacagaagatgatgggcatatcgatcggtcgcgctttgaaagcgaacgggccgaccgctgcactagcaaaaccgtaaaccaggaccaagatccatttactgaatctgggcttgcgctgcataatctcgtctagttcctgagttgcctcttcgacgccgataagatcgtgaacgacattcttgtaaacgttgtgtgtatcagcaaggcgaccaaggtcgactccttgcaccatccgtacaagcttgacttcggccgtgcgtgtagtaggatcatcaaaggacatgatcatgcaaccgggcagatataagaattggcccgaaacttccaggaccctggcggtcatttgcatatactcctccagacgatgggtcggcgcaccgtatcgcataagcgcacggcacagctgcatgatataccgctgacgtgcgatgatttctgcgatatggacggtaacacggatctcatcttctagacgggtcttgcgcttgctcttcccccgtttcttttgcataccgggagcggcctcaaccgcggcaggcaggctcgccgtgctgaggttcatggaggcattgaccaacgacgaggtggaccgatgggctgacttcttgtaccatttgagcttttccttgcgtggggtggcggcaccagaggctggctgagacgcagggataaggggcgagatgtaacccttcttcggggtggagatactggaagacacctgagtgtcactgtcggagtcatcggtgatgacactttccgggcgcgaagagctcccgctctgggcgacctgaagcttgagcaactgcgacagaatgccgccgccgactccactagaccgtctccgctgcgtaaaggcgctgatcaagccctcgggagttgtctgtcccgaccgctgatatgcgccccgaggtttgcgcttccgtagctgatcctgaaccgcggtcatgctgcgcaccaagcgatgagcctcggcgctagggggcggctcgataaaattctcaccactctccaatgcgtgcgctcggtcggcctcatggcgggcgcggcgggcctgcagctcctcgagtggaataccgctgtcgaagtcgtctgggttgtaagaggcattgagcggctcgccctcatccgtggggcgaccgaggcgttccgtcaagcggctagttttctgtcgcaacagatgaccggtcgctctgaaccggtcgcgggccgaggtcgcccggtccattttacctgtgaaatcatgtttctcggtttcatcaaactcgggcatatgcacattggagccgcgccgggaatgggccggggctggcggtgtgatggttccggatagcgggatttcgttgagatctgactgcggcagtaacggtcgtgacaggggatcggagtcattttcgtttcggcgaagactcatcgagcgaaagcgaaccctatgatgggatcggctcccacggcgtgtgggtggctcgatcccggcattgtattggttgacatcgacggtggcttcacgctcgaggctatgacgatcaccgggattgtcaatgattgggagagggtattctgcgtattcttcacttgggcttgggtgtgggttgatgatgcccgacatgaagggggatttgggtgagctcggtggctcggtgaaagattatccgagagctgcaagtcgtttatgcaaggcacaaggcacaacgaatgggagaaagcaagttaaaagaataatatatgaaaagatgaacggtgaccaggagagtaggattaagaagaaagaagagttttttttccttttgataaggctagaacaggatcaaatggcgaaaccaaggaattgccaatctaagaattccctcaatgcggatttcagttcgggtcttggatagttaaaatagttaaaaaagacttcaaaccagggagtctagatcttctagataatgaaatcataataatacatagacttatatgcacatcttctaccatggcctttataggctcaaccctaagtccacccgctgtttaaccctccaactgcacatccatggatatatgcacactggcatgtcccctctctcattcggcaattctagaattggaactccgtagagtacgtacaacctgcgcatcagctaggtggtgtgggtcatattgtggcgatcttgttgtgtccagtggtattgacaccgagccatccgggctaaagtgtttatgtatggttcgtgcatgttcttatatatactttatataaatgctttgtgaatgggttccttgccctttccttctgttttcgtccttatctttggcacacacctagagacttcaccccttaggccgcatttgatctgcctaaaacgtcgatcttgacccacgtcttgggtgtagtctgctacttcgcagccacctcctgagatagagtggagtgaaaaggatccaagtcccttgcaaatctgatgccattatcccctgtgatatgaatcaaaggaaagggttaatcagacagtttgaagtcagatttatagatagaaacatgacccactggaccctcgggattcacgcagaacattacgaatcgccgatagctcacggcccacgccacccggtggagtcaaaatggatggcgcaaatctgtgcggttacacatgattcaatggtttaatctagtgatcgagaccctctaccccctctatcccctctatcccctctatcccacatgctatcttgtacaacacacgcagtagctcttccaagtccccttatctcagctctgaccgctccctgttggaaaaggcccgttcttagatcttggaaataccgctgttgaggtatgctgcgcatggaagccacgctgcccaagggacgaggcaccagaatgtggtccgggctgctgtccacaattgaccagacccggcttcaataaaataaaagcaaggcagttaatgctcgatttgcatacgcagtacttggcatcccggtcaaagaaagattgcgaatcggtcgcatggtaaaagacgtatcccatcaacccatattcataaatgagagtctaggcgcaaagagccagcctagtggaaaatatcttgaagctggttatgtctcatagctttacttgcctatattccctataaagaatcacaagttgtctactccgtacaggtgttcataatcgtaaaacaatcatgaaagcccaggccaaggctatgtggcggatcctctggtgataggggttaccatgccaatgataaacacggttagcctgagcaagagcgacagaatagggcccggtgaaaatactatataaaatatagaaaaaaaaaaaatctcaattctggatgaagtcgtggagatgacctggagattccaatcgtcactggaagaagtggcaaacccccactatgcaaactaaacaaacaccaactagatgactaagcaagggcaagccctcatttagttagcatgtgacagcatgtaacatccattctttactccaccgatacaatttcgaagatgctcggtattgcaagaagcttgtttgcaagcaactgcctgttggtgagtgcggttggtaattatgactttaaaacatcggaagatgtcttcttcctgttcgagtctcgtgaagagggccaggtcaatgtctcggacgaggagaaactggtagctggatggacgaggggcgcaaagctgtaggcctgccttcagctcccccggagagggcccgggtcaggatagtagcattatgaggaacaacaaagccatcgacatagagtgataattcggagagttgcccgttatattgggaaatgtcattcgaagcttccaagtttctggcgtggatgtgctgtttgaactataaaagctcccgggggatgtgcgcgagttgtctagatggcgtcttcaattaatcattaggctataataggataaaaaatgatatagacggcgaattttctgatagcagccaaaaccaataggacctgcgttggcccacacgtttagcaatttagaaatatcggtgaacattaaccgtcggggcttttatttgagaattgtcaattagattgggtacaacaccgagtagacaatgtggagtatactgacacattcagatcgatacgtgtctgtttcacagacagctgcgccgagttcagcccgaagttgatctgtttcgcggcgagtttcagggcccctggtcgctcgtgcatattgatgaaatgaagccgaatgagttgaatcgcttttccgccgtgggttgttcgccacaaagcaagatataaaatgtcgcaggcagacatgaccatcgccatgccaagtagcagtaattcttgatgataacggcgacttttgctctgcttaatctatccatcgctacccaacacgatgcccttacgattgttgtgtctccatggctgggggacgaatcagaaggtaagctaccaacgctgctgataggggaggggtgacggcaatcctaatttgccaatagattttacagtcacaactgagtatgcaatcgcctactacagtggcgaaacacagaactctaatcaaacaggtgcgctcatgcatgagctccaacgcgacaacaccgcgaccttctctttcctcgaaggtgacgtcgattcagatcccgggcctggaattgccggttactatgacggtccgtactacagctactaccgtttcccacgcaccttttcccacgaggacagcgatgagtccgacatcctggaggcatacgagcaactgagtgaaacagttgccttggaaggtccgtttgatggggttctaggcttctcccatggcggcacattggcggctgggttcatgatccaccacgccaagatgaatccaaatgagccggcgctatttcgatgcgcaatcttcatcaattctctcccaccgttccgtatggaacctgggaagcgtcctatcgtagacaagggactggaggggtttatctctatcccctgcgtgcatatcgctggagctaaagacccactctttgaatactcaatggccctgtatcgactctgtgctggaagggattcgacatttgccgtacatgggaagggccatgatgtccccagtgatcggaagaatgtcgccataatcgccactgcaattcgaaaactatcaagtcaaattttgtgacgtcggataccaaaggcatggtctttacttcggctgtgcgacacagaggtaaagtttgggcgaagaagagtttgtttgtagaagagagtagtatatttgcggttgtggaacataacctgttgttgtaatggtatattgcagattcttcgcgaaggcagacaatgtgtttcagatcaagacattcaggacccctgaattttgtttcgccgtggagggttgcacccggatacttacctcgttgcgactggggtgaaaccttcccacacatcccgatgtagattgtcaccgagaacgaatgacactaagaaatcgagtagatagattgctttgatacaggaagcccatttacctggcctgagtagtcccctctcgcttttccctggtatgagatatatgttattagccgacatccagcaaagcaaatgcaactatgtcgtcacaaaccagcgacaaaccccccaaagcgaccgttttgcaagatgacccggcaaacttggcaatagcaattgtgggaattggcttccggggaccaggggatgccaaaaatgtcgagaagctgtgggaaatgattctcacgggtagagaggcatggagcccaattccagctgagaggtggaacagtgcagcattctatcacccggatcatgcccgccatggaacggtaagttatgcatgagatgaatccgaatacttaataacgtgagagtagatcaatgtggaagggggtcactttttgaaagatgatgtatctgtcttcgacgcgccgtttttcaacatgacaagcgacgaggcagcggtaagtacagagttgaatgttgttgggctcatctaattatcaacctaccaggccatggatccacagcagagattgctcttggaggtagcatatgaaggtcttgaaaatggtaggttattgctccgaatgacgttttcgaggctgatgatggtggatagctggcattcccctgaccaaaattatgggcacaaaaacttcctgctttgtagggtctttctctgcagactatacggatctcttacttcgggatcccgagtgtgtgcccatgtatcagtgcacaaacgccggacaatcgcgtgcaatggcggcaaacagactgtcttatttctttgatttgaaagggccctgcgtcacggtagacacggcttgttctggaagccttgtggcacttcatttggcatgccaaagcctccagacaggggactcatcaatagcgattgcagcgggagtcaatttgatcttgagtcacgaatttatgtcaacgatgagcatgatgaagtatgcaagaaattacccgcaaccgggagactagactgatttagtcacaggtttctctcctcagatggaagatgccatacctttgatgaaaaggctagtggttacgcgcgaggcgaggcagctggctgtctcatcctcaaacccctggccaaggctctacacgatcacgacaagatccgggccgtgatacgaggcacaggttccaatcaggacgggcgtactgcaggaataacgctacctaacggggcagcccaagaaagcttgatcaggagtgtctatacaagggctgatctggatccctcggaaaccgattttgtggaggctcatgggacaggcacactggctggagacccaattgagaccggggcaatcgctcgtgtctttggaactggtcgtccgcctgacaatcctgtgcgaattggctccatcaaaaccaacgtcgggcacttggaaggcgcaagcggagtagcgggtgtgatcaaggcagtgctaatgttggaaaaccgcatgttcttgccaaacaggaattttgagacaattaacccgcgtatcccactcgacgattggaaactcaaggtttggatgttcgggaaagctaaagattggagactaacgtcagtaggttcaattgcgccctgagccatgggcgactacgggccctcgtcgagtttcagtgaacagcttcgggtacgggggaagcaatgcccatgttattgtcgaagatgcccaaagctgcttatcgagctggggattcaaagaatatgacataatccaatctacagcgactaaatatcataacgagacacctcctagcctgccgcgtggtttatctcgcatattcatgctctctgggtttgatgaaagaacctgtgcacagcagatgcaggctctgagcaatcatattctcgataggggacatgaagttgaccatgaaaagtttctggacgaacttgccttcacaataaacgagcgacgatctgtctttccatggaaggcagccattgtcggagatacgatggcaggtttggcagcctcactttctcagaacatcaaggctaggagcgccgtacgacagccaacccttgggtttgtctttactggacaaggcgcgcagtgggctgggatgggaaaggagctgcttcaggcctatcctgtcttcaaaaggtcgatttcgggtattgacagatttctgaatgacattggagcccctttcacagtggaaggtacacagacaccagacttctaaaggtcccgtacactgacatcatgaatgcagaggagatcacaaagtgtccccaggactcccatttgaaccatccaagtctcagccaaacagtgtgcacagccatacaaattgcgctggtcgacttgctggaatcgtggaatatacatccagactccgtaacgggtcattccagtggggagatcgccgctgcatatgctactggagcactcataatggacgatgcaatgtcattggcatactaccgaggcgttgtggcaagccagcttctgcatgaccaaccgaacagaggtgccatgatggcagttgggatgtctgccgaagagatacagccctatctggacggattccagccccgacagctggtggtagcatgcatcaacagtccatcgagtgtgacgatatcaggtgatacacttgcaattgatgcactcgcccaaaccttaaaagaacaggaggtttttagtcgacgcctcgaagtaggtgtcgcgtatcattctcctcatatagaacaggttgccgagaagtattacagcttgatagaccatatccagccccgaggactggatcagatagcgggagacaagagaggaaggtcggggtcgttcttttcctcggtcactggaacgatgattcctttggaagaattggatgctcagtattgggtgtcaaacttggttggacaagtgaaatttgccaactcgctgaggtctttgtgttttgagacaaatagtcaacgtgctgggaatacagggggttcccgaatacgaaaggctggggcagcccgaaagccttcggtggattgtctgatcgagatcggtccccacgcggcactttctgggccgatcaagcaggtcctccaggcggatgcaaaactcaatgctgccgatataacctatattagcattctgacccggaaggccaacgcagttactacagccctcagagcagtcgccacactaggatcactcaactgccccattgaatttagtgcaatcaacaggcccatggggagaagcaagagtggcacgctacagttactggttgatcttccgacatatgcctggaatcacaccaggtcatattgggcagagccacgactgagcaagatgtatcgaaaccgaacctcgccgcggatggatttacttggtgcaccagacaacatggcatgtccattcgagcctcgctggagaaattatcttcggacttcggagctcccttggcttcttgatcacaggatacaggggaacattgttttccctgccgcagggtatttggtcatggcaattgaagcatcagcacagttgagcaaagacgaagaaaagtttgcgagatacgtgctgcgagatgtggcaatacaagcagccctggtgctcaacgaaacttctggcgtcgaggttatggtgtctcttcaaaagacgacgcaagaccaagaacagttgtacaatttccatatatactccatctcggaggataacaggtggactgagcattgcactggactggtcgggacacagaaaagtattggcatttcaggcgacggagtcgaggaaactgatggttatgcgacggtcccgttgggaactgaaattcatggaatatcagtgattgacgtccgtaatttctatgacaagcttcaaaattctggtctggaatatgggccatgttttgcgaatatcacaaaagcacgtgtcactcaagacggaacgtgccttgcagaagtcactgtgccagatacactatctgtgatgccagcatcatttcagcatgagcttttggtccatccttgcacgctggatagtatgttccacaccatttttgctgctctacctccaggtatggggcttgaggaaggacctgcaatccctgtttcaattgaagagatgattgtatcatccagtctcagctgcccggcaggagaacccatgagtatctgtacccatgtgcgcccgatgccaaacaaggacgtgacagcatgcatagtagcagtgaattataacgcgacgcaatttgaaaccgagccaaccatttcacttcgtggcctgcgatgtgcacggctcgagcgtcatgaacccgcgtcgcagacaaaggacaaccgtacaatctatcatattgactggaaacccaatccgagttttatttccagtaagaatgcctcgtttctatttggcagggaggatgctattcaagagccagtccttcgagccgagcatgatgagagtgcagctggcttcatccgagctgcgttaggggaagtcagcacaacggaggcaatgggacttgatccttctcatcgcacattccggtgttatctccaagacgtgcttgaacgaaatgataaaccctcaatatcgttatctcacttggaaaatatcaattccgcccctatgggaaggctcctgtcggtcattggccaaaaccttgcggctattattagacaccaagttgacttttccaccgtcatcaaggacgatcgccttttggacgagttctgggatctattctcagcggacgcctcgtatcaagcagctgcaaagtatgtcagtttgattggccacggaaagccagacatctccatccttgaacttggcgttggcacaggccagatagcggagataattctacagcatcttgtgacgctcaacgagacagcctgttgcgggaaatatacatttgcccacgaaagcgcttccgtgctggagcatacctcgaagcggctggaggcgtggtcaaaatgggttgagtgcaagcccctggatcttggcaaggatttctccaaacaaggatttgaaaaaaattcatttgacgtcataatcctgcctcatggattgtgtactgctcgttgtgaacaatatgcacttaacaagatccgtgatcttttgagaccatctggctatttgattgcaaccaatcccttcgacccaaagaaggatgtgctgaaaaatctcttgttcagtgccttgcactgcttatctgcagacgaattttgtttgggccagggtggttggacaacgagtcaatgggatgaaatcctgcaagatgcgcatttcaccgaggttgatgcctatggggaacaagactccgagaagagccatcagtttatcgttgccagaaagcgaaaagcccaaaagtcgcccagaaaggtatctattatttgcgaaaacgaaaccgaggctgccaggaatctagtcactgcgctcgagaatacttcatgtgaggtgaatgtgatacacatcgataatctggagtgtaaggatcatatttgtttggtcttggatacaccgaactcctcgctgctagcctctcccaatgaaactacattcagcaagataaaagtaatgtttgcgcagagtggaggagtcctctgggtcacaaagggagggatgattgagcccgtcaacccaaccgccaaagccgcggttgggtttgcaagaacagcgcgcgccgaatccggtgtcaaaccgattgtcacccttgacctggatgctcgaaatcctctctcggaatctcaagccgctgagatgatcgcaaaacttctggttgcccgatttcttcgtgaaacccctgatgaagacacggaatatgcggagagaaatgggcaagtcctgattccacgagtactagagaattcgaaggcgaacatggctatgaacggcattaatgacattgaggctgtattcgagcagcctttctatcagcttcaaaaacctctccgtctttctagaaattctaacaactccggctttgttggtgattcgcagatgacagaactcccagtcggctacatcggaatcaaagttcaatccttcggtctgaataaatgggatattcagacagaccaccttgactgggaaacagacgacactctcggtctggagtgcagtggcatagtatacaaggtcggcgccgaggtccacggcatcactataggggaccgggttgcttgtcttggagctgggactgcgagaagcttttatcacgatcgggcatcagcttttcagcggatcaatgatgaaatgtcattacagctggcttcggctttgcctctagcatataccgttgcttattatgttgtgaaccacctctcaatggtcgagtcaaatgatgttgttcttgtccatgacgctggaagccacttcggccaagcacttctggaagtgtacctgcttagggatgctcgggtctttgcgacagtgaacggccccgacgaaaaggacttgctgagctcgaggttcgggatacctggggagcatgtcttcataagcgggaagggagatatagccaaggggatgttgcggtcaactgatggcaagaaagcgaatgtagtagtcacattccagagcgcagaggataaaatgctccagaactgcattgcgccatttggtcggtttattcaacttcgaacagacaacctcaagacccggctcttatcacaccctcgaaacatgtccctgtccacaatcaatatatttgggcttcaaaaggagaggactgaccttgccaaccagatgtggtcgaaggtctctcgcttgttcctagaaggacgactcaaagggcctggctttactgatgtatatcatgtttcacatattcaagaggcaatgacggcaatcaagacccgacagcatgttgtggttcatgtggaacagagtgatcttgtgaaggtatagtttatcctaagcaccggaggacgtccatttgcctccagctaatgtgatttaggccacgctccctagggctactcagccattgttccactcagatgcgtcatatatgctcgttggtggacttggtggaattgggagggaggttgctctgtggatggcaaaaaacggagcgaagagtctcattttcgtcaatcgaagtggcctttcaaagtctcattctcaggcaacagtgaagaatctggcggaagaaggtatccaggtaactactcgagcttgtgacatatccgacgagaccgaagtgcagcgaatgcttcaagatatctcttgtggcatgcctccaatacggggactgatccaggcagccatggtcctcaaggatgttcatattgaaaacatgatgttggacgagtatcgggatgtcatgggcccgaagtattatggcacttggaatttgcaccgacatctccctaccgatcttgacttcttcttgatgttatcgtctataagcggcgttataggaaatgccacacaggctgcctatgcggccggcagcactttcatggatgcattcgccgcttatcgaagaaatttaggtcttccaacagtatctttggatctcggaacgattacagatgttggccatttggctgaaaacagagatttagcggcaaagatggaacggcaaggattccagggaactgatacaccaactcttttatccctgatacaagttgcaatttctcagtcaactagcggagcagcacaactcgtaacgggcctcggccgatggaaagaaatggaatcacttgggaactttgatgtgcccctgtttgcccatttccggtacaagttccagggccatgacaaatctactgcgcttgacgactcgatggaaggattaaaggttgaacttgcggccgcaaaaacggtggatcaagctaccgttataatctccgacgctctcagcaggaaaattgcctcgcatctctctatccccattgaaaatatcaattcttccaatccggtctccgagtatggaattgactcccacgtggccgtggagctgcgcaactgggtatcaaggtccatggactgcactgtccccattttggagattctagcaaggtctatgttggagttgtctcataaaattgccagccaaagattcgagggcaagtcggagtgagtaggaaacctttttggtgatcgggaaatagaaatatctatatctagcttctcatccatggagatatattagcgtcgattaatcctcccgtgactttgtaaggagggaaatttggacctgagggatataatggattaaagcggcttagagtcagtctatttgacatcgaagagatcattcttgtcatagtaacctcaggtattgtccaatattcgctctaccgtgcacaccctatgttcactcccacttcagcgcatcctgtccgtcgactgcggctcgcacccttgctcaaagggagcacagtgggcccggaactcacctctactgagaaccaccgtccttcttcttctgtcacgctgacttggcggtaattcctcctcacgctttagtactatctgcctagtagatgggattatgaagtaatctcttgtattgcagagtagtaataaacaagaaacaggaaagaaacaatgtaaccaagagagagatgttacagtttggttgcacgagcccaaaacagttgcatctgcccactatgagagccgggaactggcgatagtcgatccgccagcacaaactgtgactctccacagcccgcttgttcgaagagggagaatatctgcctctgtgaaaatccatcgtgcgagatagtatgcgctgcaggatttttcggatctactagctcatgcatgtggtgatggtggtggttctccgaagaggacggagttgtctgtactacagcttgctcctcagtctcgttcgacacatcgcgcgtcgcccagtcaatgattagaagtacaccacccggtcgcagtctttcggcgagacgtttggtggccaaagcgatgtcttcgacatggtgcaatgccagacaaatagcgaccagatcgaaaccattcagctcctcctcgctgagtggaggcctagtcggtgtgattgtgggagccaggagattaccctgaacggcgaacatgcgcgactcgtcgaggcctagttctgttgcggttgcacggtaattttccagcatgccatctgacaggtcgacgccaatacatctggaaaaatgatggtatagggactagcagaacagcaactgtcagtattgcctgctgcaggtgctaaactaaggtcagtgactcacgcgagaaataatgccatttccgcaggcataatccatcaattttgtctgccgactatctgtggaagaccgaacgcctatccagtccacgttgtccgtcaggaagtcgaaaatctgcgtctgtagatcttgaatccatttgtctttgaacacatgctgagaggcatggctagacacggtcagcagtcagaattatttctcccaaggtcctctccgtgcgtcttttcatgggaaatctctctatcgctttacgactcacttccaatattcttgattcttgctggctagtgtctctcccattgtgctaggtatggtcaaggtctcttgtatgaatatggtccgatatcgaagaaggaaggcgaatatggccacgactgcagctgcgcgatatctccaggtgaacattggtgaaaaggtaatgtggcactacaaggtatttatatgacccaactaacatgtgatcagatatttgatgattgaaccttccaaggtcccggggaaaaccatcgcttacaaaacatagaggaggccaggtctgtgttggaggtgtaggtcgtggacaccgattggcttatcccaacagatcaaagcatcaagcccacccggagaatatctcacggctaatcattcagctttcctccagggtccccagccatgatttgttgatggggtggagtatcttcggagtccgtcagagtctgcgactggaccgtatgtagctgaggtcattgtaataatcatgttgtctaagtatcgattactacctcaaagctaccatgagcatcagcatccttatcatcggtagaggataagccgagctgccagtcgacaccagtctcgtgcgccaactgcatcgagccatcattttcactcccggggtttatcgcaaattcctcgcaagacgcatgcacaatgtcgcctcgtgggatcacaagtcgcttgaatttcattgaggccgctagagagcgttgctatcgcggtatgacaggatccaatttgagaatgtcgacataagaaggtctaacggaccaccgaagggatgttttatgccgttgcctcgcgaaagcaggtatggacggggaagaaattagtattcgataagtccgcgatatttcccagatattacgggatagggggagtgctagcacggggagtgtaaggatcatctcatttcctttccttttcctttcatttagttttgttgtttgcatggcacggcagttttcactgtcccttattagcgttgaagaacgaggctgtggattcgctgatcgttggggttgattccaacatcatgccggcgatgtacgttgaggtcaaggcacttggctattcttgcgtacgggataaacaatgcttcaagttctccttcctgcatttcctggtcatcttctcacctcaccgagagcccgtgaagaaggatttccccctactgttacgctgatggctcaggggaaggaatagatgtattatgctatgggtcacgtgggcggtatgtccagaggggtaacacctcctccgtactgtgtaggttatcgacaacgaacacaggaaatttgagtgctaaaataattgacagacgaatattggctatttggggaacgtgatccacagtggtcaacggtgaacactttgggggttgtaataaggggatatactattaggcttcatgatcccccgatgctccaaagtccctttctatcatggatcgtctctccagcaaatctcaaacggcctctcccgagtacaagcccagataatgattatggctcagcatgtttcatgttgccatttcaaatcaaaagtcggtcagagatcaaaagttgtaagtgcatgcattaagttggtggagagacggggtaactaactatccaggctatcgagataccgtcggcatacgtcgacatagccccataccatattcttacgacatctccgtcccatccaatgaacatcatcctcggtcttcggcttttgaccacatttaattcctttaccacgcgtacggagaccgcgtcgtgccaagactccaatcggaggcacgggtgagcgaagatgccgattagtcagcggcttcggtccaaaaagcgcctccgatccattttaagttatcaattgatgactctttacggagtacaggcgctctagagcgaaatgtttgttatcacttggggctccgcacagaagtttcgacgctgcgaataaaaagcaatgtttgcttcggcctcggactttcggggctgtcttggacccctgagactctaataaaatgatggagtccccccaagtatctccatggtctgatcagcctctttcaacgcctctccccctttctcttcccaatcatcatggatgcttccgaaaaaccaccgggcacaaagtcggatgaaatccaattcgataccgatgccatgacgatcacaggcgacgagacttctggcacggagagccctagtccaaaaggcaatggctggagcatgataacgaggctccaggaggagaacgatcgcaacctggctgctggattccgaaagcaggaacttgggatcacctggcaggatctctccgtgcaggtaataagctcagaggccgctgtgaatgagactgttctctcccaattcaatattcccaccaaaatcagagagggccgacaaaagcctcctctacggaccatcctcaacaagagccatggctgcgtgaaacctggtgaaatgttgctagtgctgggccgcccaggctctggctgcacgacactgttgaaaatgcttgctaatagacgaggaggttacaaatcagtggagggcgaagttcgctttggatctatgcagcccaaagaggctaaaatgttccgaggacagattgtgatgaacactgaagaagagatcttcttcccagccctgacagttggtcaaactatggacttcgccacgcgcctcaaggtaccctttcatctgccagacggtatgactgccttagaataccaacaagcatcgaaaaagttcctccttgaatccgtcggaatctctcacaccgaggatactaaggtcggtaatgagtacgttcgtggagtgagcggtggtgaacgcaagcgagtctctatcattgaatgtatggccactcgaggctccgtcttctgctgggatcaatcgactcgtggccttgacgcctctactgcccttgaatggacgaaggctattcgagccatgaccgacacactcaatctatcaaccgtcgttaccctctaccaggctggtaacgggatttacgatctgttcgataaagtccttgtgcttgacgaaggagagcagatcttctacggcaccagggagcaagccagaccattcatggaggaagccggatttatctgccttgaaggctccaacgtcgccgattacctcactggtgtcactgtacccaccgagcgcagaattcgagatggcttcgagagccgcttcccgcgtaacgccgaggcgttgagagccgagtatgaaaaatcacctatttatactcaaatgatagcagattactcttacccggactccgagctcgcccgcgagcggactgaggagtttaagaaaggcgtagctttcgaaacatccaaaaccctgcccaaaaatagccccttcaccgttggcttcgtggatcaggttaagatctgcgtgcagcgacagtaccaaatcctttggggcgacaaagctacatttatcatcaagcaggtggcaacactatgccaggcattgattgccggctctctgttctacgatgcccccgataactccggtggacttttcatcaaatccggtgcccttttcttctcccttctttacaacagcttgctcgccatgagtgaagtgaacgaatctttctttggaagacctgtgttgatcaagcacaagggtttcgcttatttccacccggccgctttctgtcttgctcaaattgctgcggacatacccgtgttgctgttccagatttccatgtttggtctggttctttacttcatggttggactcgcaatgtctgctggagcattcttctcctactggattatcgtgtttacgacgacgatggtaagtagcttccaatttgttcacatgttcttcatctaatcaacatatagactatgactgctcttttccgggccgtgggggctctattttctacatttgatggagcttccaaggtctctggtttgctgatcatgtgtactgttctgtacaccggttatatgatcccaaagcctacaatgcacccgtggctcggctggatcttctggatcgacccacttgcttatgggtttgaggctttattaagtatagaattccacgataacagcgtgattccatgcgttggaacgaatctgatccccaatggccccggctacgagaatgtccaggcacatcaagcttgtgctggcgtggctggagcgatcccaggtcagaactacgtgattggcgacaactatctagcgtcgctctcgtacagccactcgcatatctggcgtaacttgggtatcaactgggcctggtgggctttgttcgtttttgtcacgatcgtcgcaacttcgaggtggcagtcaccctccgactcaggtagcacgctggtcatcccccgtgaatatttgtacaagcatgtcagaaatcagcaaaaggacgaagaaggccagagatcagagaagcgagtttctgaaaccaaggatgagaccccaaagcttgacaaccagttaatccgcaacacgtccgtctttacatggaaggatctttcatacacagttcagacacctacgggtgaccgtgttctccttgacaacgtccatggatgggtgaaacctggtatgctcggtgctttgatgggttcctctggtgccggtaagacaactctacttgatgttcttgctcagcgcaaaaccgaaggaactattcatggttctattctggttgatggtcgtccattgccgctctcgttccaacgctcagcaggctatgttgagcagttagacatccatgaacgtatggcaacggtccgggaatcattggagttctctgccctattgcgccaacctgctgccattccacgcgaagagaaacttgcttacgtggatgttatcatcgacttgctcgagctccatgatctggctgataccatgatcggtactgttgaagctggattgagcgtcgaacaacgcaagcgtgttactatcggagtcgaacttgtttccaagcctagcattctaatcttcctcgacgagcctactagcggtcttgatggccagagtgcgtacaatactgtcagattccttcgcagacttgcggatgctggccaggctgtattggtcaccgttcatcagccatctgcacagcttttcgccgagtttgatcagcttcttcttttagctaaaggaggcaagactgttttcttcggtcccattggagaaaattcacagggtatcaaggggtatttctcacgttacggagcgccttgcccgcctgaaaccaatcccgcggagcacatgattgatgttgtgtcgggtcaactgagccaaggcagagattggaacaaagtctggctggagtcacctgaacacagtgccatgctcaaggagcttgacgagatcattgaggccgctgcattgaagccgcaagttaccaccgatgatggtcgggagtttgctactagtttctgggagcagaccagtctggttttgaaacgtacctcaatggccttataccgaaattccgactacatcaacaataaattcgccctccatatctcatcaggattgtttgtgggattcagtttctggatgatcggtgactccgtctccgatcttcagagtgtgttatttttcgtcttcaatgccatctttgtcgctcccggcgtgatcaatcaactgcagccgaccttccttgaacgtcgcgatttgttcgaggcacgcgagaagaaagccaagatgtactcctggaaagcgttcactatcgccttgattctctcggagttcccatatctagttgtgtgtgctgctctcttcttcaattgttggtattggacggccggtatggcagttgaatccagtaagagtggtagcatgttcttcgtgtttttcctctacgagttcctctatactggaatcggtaagctgaccgaccatgttcatcttgaccccaactaacaaatgaacttaggccaatttgtcgctgcgtatgcaccaaacgcccagatggctgccatgataaaccctctcgtcctgggcgtaagttttctaagttctcgctcttcctgatatctcagctaacaccgcacttctcagacaatgatctccttctgtggcgtcctggttccctacgcccaaatcgtcagtttctggcgatactggatgtactggatcaacccattcaactacctcatgggcagcatgttggtctttgggctgttcgatcgcgaagtcaaatgcaaggagcaagaattcgccaagttcgatccactcaatggaaccacctgtggtgaatacctgagcgacttcatgcagaccattggcagccgtatgaatctcatcaatcccgaggccaccgaagaatgccgtgtgtgtcaatacacccgtggatccgattacctcgtcaccatcaacctgatggactacttctatggctggagggacaccggtattgtggccctgtttgtggtcagctcgtatgcgctggtcttcggtctcatgaaattgagaaccaaggcatccaagaaggcccagtgattgaggtttggaccttcagggggtgtgaattccgaattttcaaaagttcaatgtctagacttggaaaccttcttttcttcctatgcaaatacatagagagtatgtttcatttcttgttctttgcagatagctatagaatctgtgcgtctctactcatttcaaatttaaatatgcatcacttgatcttattgtttctctcattgaatttcatggggaaagccctatatgacagagaaactcataccgagacggagtctaggagttaccccggccaagccccagccaagctccagccatacggagaacgtgcgagtcctctggaaaatcaaagactggtggcagtgatcggcatatgagaatgggatgcaattcttataatacatcgctgttcagccttttgtctcgaatagacgatgctacatctttctacaaaaccgactaagatgggagtttccagccagatatcgcatatcttctctaataaacccaagtaacaaagtttcccatgcagctagactggtcacggaccttgtcggaccttgtccgagccaaggggaagaaaacgcccaagctgaagtcctgaaagtccagatttggcgaaagccatcggatcaagagtacaaggaccgatattcctcctatctctgctaatgatgatcatgcctccaccgtgggggtcacccaccgcacctttcatcgtatcattcccgaggtcatcgccaacgctgtcataccaccagatcttctcgtggaatttccgaaattggatttccccgcaaatcgagtgggccatcccccacgtttctccagaattccggattcacggggtaaatgcgatcttcagagctgtaatatgacatggcacatgccgcttctcacacataaatgagtgccggtcccgggatcttgtccccgttctatactacttacatctgatcaagcaccatggccggaactgaagatgccatcaccgaggcggagttggggatgaagatggacttgagccatgaggaagttgtccatatggcagagttgaccgaggaggagaaagttatcgagaaggcattgcgcaagcgcattgatgccctgatcatgccactggctattctggtctacctcatgaattatatcgatcggtacgttcatctcgtccatgacagttcgtcaacgctaatagaaccagcaacaattacgcagcagcaaagctccaaggtctcgaagaagatctcaaacttgacgatacaaagtaccaaaccggtctctctattctcttcgttggatatattctcatgcaagtgccttcgaacatgctcctaaactacatgggtcggccatccctgtacatcggtttcttcgtctgcgcttggggcctggtatcggcggtgacaagtcaagtctcaagctatggaggcattgtggcctgccgattcattcttggtttggtcgaagcgcccttcttctgtgccattctcttctatctgtctaaatggtataccaagaaggaattggcgtttcgaatgagtattttctactccggctccctgctgagtggcgctttcggaaatctcatcgctgcgggtattctcaacggcctcagaggccaccgaggactttccgcatggcaatggctctatattattgaaggttctatcacatgcgctatcggactggtcatttgcgtcgttctacccgactttccggagacatggaagcttttgtcccccgagatgcgcaaagttgcccagcggcgtcttgccattgaggctggccaggccgatgtggatgaagggggtggcagaagccaggttgaggggttcagactcgccatgaccgacatcaagacatatgtattcgccttggcatatatgtgcatcaccggagcggcgggtttccagaacttcttcccgacattggtcaagactctcgacttgccggaaaccatcaccctggtgctggtggcgcccccctatctcttcatggttgtatattctctttgtcactccatggcctctgatagattggagaagagattctggttcttcatctacccgatcccaatcaccatcattgggttcgttattttcatgaaaaccgattcttttggaccacgatacttctcattcttcttgatggtcttcgtcttcgcccagaatggaactctctattcctggctcgcgagctccattcctcgtccaccggccaagcgtgctgtcggtaagtcatatccccttagtgtgttctattgatcatcaaactaatcgaaacagcctttgcatttttcaactcaattggaaatagcgcttcaatttggaccccttatacgtacctcgacaaagagaaaccacactaccccatggctatgggtgtttgcattgcgctacagataattgctggtcttgcggctctcttcttatacttcaacttgcgcatgctcaacaaacgccaggagcgtatggaaaatgaggaaatgcagctttccgagaaggatattcgtcggctgcaggctactgctgatatagaggggattgatatttccgctgctagacggctgcagaagggattccgctatgtattgtagaagaattctagcagattgtaatttgatttgatattccaattagagtgttttggcttgtatatccatgaaagacgccgattattgtacgacagaggcccattgtgaccaactgtcgcaactctgaaccggacgtagcaaaggaatagagtccgagtggtatgactgtcatatcataggcagtttccagacttgtcgagggtgatgatgctatccaatcatgaattgaccgcatcaacccatatatggtcagctgacatggctctgaagtcattgatttaaatagtctgaacttcatcaccttcatctccaacatctctcccatctctactatctctgaattattcaaaatcaaatatctgaatccgactcagtacattattgcacacagtgtgacacccttcccatcactgatcgacgtaaccccacaccccacacccccaaccaccatgcaatcagcaatttcccgacccattctccgtgtcactaccaatccaactcttctccgatccctctctatcaccccgagcatcatgagtgcaggcgataccggtgctaccaagtcggagttcatgggccagtatggtggcacagtgcaaaatagatgacgtcatatctgacttttggcaggaaggactctttcgccagacgcgaggctgcacacgaagccatgtacattcgacaagttgagatggagaagtgagttacactgcatcaagttcaatatataaacttacctggtggtagacttgagaatctcaaacgaaaggtcgaggagcagcgcaagcatatgaatgaacttgacaaacatatgtggggatatcctgaattttcccactcgagaccaacactgacaggtcatagcgatgagtatactaggtcccagggaggtgaacagaactaggtttgccacttggttgcgagcatttcctgaacggatcgagttctcaagacatcgacatatgccttacaatcaactcaacattcgactaacagtgttataatgattttcaaacctcttttcacgataatttgttagctagcgctattaccacttggaatacaacatcaacttttatgcaggagattcctctctagtctcttaaatctttgtctgccacctccaccggtagctcagacaggcccatctggccatcacgaacaaaccaagtgacactatcagaacacttcccagatatgccaccatggctctcttcccgactttgtcgagcatctcaccgccgatggggatacagatcagtgttctaagttcccattagtgaggaactactactactgacgggatttgaaagacttacgcaatgctaacaatcgaatatgtcaacccgaacctgccgccaacctcgcttgccttagatatctgcccgatgcaggctggcgcaagacttaggaatgatcctgaagccaatccgaagatgaccgagaagatataaagccctattagggaatttccaaacggcagccagaccacaaaaactgcgaatgcacccagagcaatgagtgcagtctgggtgttgattctgccaaaccgatccgccacgcccccagccatcagtcgtccggccgtggatgctctatgccacactagtcagcgcttcgctcgagagaccaccaacatacattaccactcacacgttgagaacagccagaagaacgacactggtattggtagaaaacccctgcatgaccacgtaggttggataaagacctagaccagcgaaaacctcgagctcaagagctaccccaagtcagtacttgtttctattatccggattcccgattgaaagcgacccaccaaagatacccattgtcaaccaggtaaacctcgcatcttgcaaggaacgcaagttgatagttgatttacttctgccctttggaagacgtgccttgaccagagctgttccaaggacagacatcaccagtatcaacaatgccagtaatcgaattgtccacttatatccaaggttggtgaatccggctcttagcacaaacggaaatatcacaccaccaagacccgcgcccgacatcgaaatcccaatcgcaagggctgccttgcgatcgaaccattgaggcacactagctaatgccactgtgctcaagagggcagcaccggttccagaaagaacaccaagggtaagaacaaaatgccagtacagatggctttcggcgagaagaacaaggccagtcacatagcatagagtgccagctataagaatgcccctgggtccatagcgatcaaacatcggcccaacctgtacagaaacactcagaccgaagaaggtgaacagccccggaatccagccgactgcactcggcgaatagctggctagctgatgggaagcgaagtaattctgcaggattcccgtcgtgttcatcacaccgaatgtactcatcaagagaaagaatgaacctgccacaacacaccacgcttgcaaccctccatctgggaatttgtcgtcggtactatgaccggtcagatgagttgtgagtgtggatagctcggccggcggctcgactatggaaaatgccgaccggggagcttcttcgtcgaagtttgcattgtgaccagtgggataactagtgggatattccgaaacgcttgtcgcagccgactgccatggctcttgaactggattttgcacagatgcggtggcagacttttgcatgatgttatttctgggcctcgacagatgatcccgagtgatgatactgagccgagacctttggactgtaaaggaagcagcagaaatgaaaggcaatgcaccgatctcaacaagtcaacagaatattcagaacctaagccatgcgaagatgactcattgcgataaaggtttgtcttagtcttcatgatttcatggtggggtagaagtatacatcggcatccccttccgatcttgaagatggggatcctgggcgccaacaagatatatttcgcttgattattcggagacatggagctagcccgccttcaattgctccaatgaccgcagtggatgttgcatttctttgattctagcaatgatacctacgaaatatccatcggctcccttcccgacgcatggatagtgagcatccatgaaaaggggaatccatgaacaagggaaatctccgtgagagatacatatataaagatatcgctctggggatatgttcatatatgtccatatattcttctttctggagtccataggtatctcggagacaccacccgatatgtatattggcgtctacctcttcacggggaacttgtataaaatagtttctcccaattccaatcttcacaagctggcaatcgatccttcttaaacaaaaagacgatgatgtagagtgaggttgaagatcggtggcatgacacttgcgccacccaaccccccaagatgccgcgccaaatatcccgatttcctccactggcacttcacggcggagtggcatgatttgcaagtaagccaggtgacgttgtaatcatttcgtgaattgcaattgtcgactggcgagcatatatttattcttctcttcaacacatcgtccaagatctccaattcaacaactcaattgatacctccattcacaatgtccgcagcacaatgcaccaggctcatcgccagaaacatccctcaagttcggcgacaacgccaactaccaaatcctcgcgttactctggttggcagtccagccccaagtcgcaaccctaccattgactctgaagttctaccatatcgactctacgaactctcactaaagaagattcgaaaagaggcccacgctgctgagcccgatctacgccatgtcattgccggcatcacaatgcaaaaagtggtatccagtgccgtgcatgatgatcttctacaccgagtcgacctgatcgaaaatgcaaaattacctacaacactacccatcctaccgggcgccgatgagccctgggagcatgaagaagtcgcaccgaaccaaatatcaaatccgaatgcgtgggatatggaatctcttgaccaagcgctttgtgaaatggaacgcgctagcaagaaagggaatattgcaaaaattgtttgttttcagttgatcagtgagatgtaaaagtccagttcacattcataccagcttgccacgacctgttcagaagtttgagtgtcgttgaaacatttgttatagcgctatggattttgcttcattttatttatatatccccctcacttagctagcgagacataagctacatgttactgtcatataaaatttacttggaagttagcatttgaatggcgacctttctctttctccctctgaacctgttgtgctatacttcacagcggcgtaacgcgcgggcattctactggtccatatatataacttcaatcaaaggcgagttcttctttccttttgcgtaaacccacattactacttactgcctcaacgacacaccatttacccttgcagacttgagactttactactttgcagaattaccgcatccaaccatggccgaagaaatcaggttgtgtcacacctgcaataaagacaggccgaaggatgcatttcgggcatctgaaggtgcagcgaaggagttctacaaactgtgtgaggattgccgcacgaagtaccggaatgtgggtatatcatatgcctagatgggcaaataattccactcacttatcagatccagagactaaaaaaaaagcagagatcacgattcaaaagggcgcaaggaaacacgcaaggcaacaggggtcgatcccggccgtattatctcgctaatccagcaccccgaactattcccgacgtcagcaactcgcagacaggacttacctctgaaggcatcagtgctgcaccgacaaccaccgtacatggccaagcgacaggttcgcacgcagatcctagccagcacagttgggtcacagttgcaccgcccgttatcgaaagttccgcgcaaagcacaacaacaaccactgtcatcaccatttctaccaccaccaagaatatgatggaaaccaccacaaagccagaggaagacaaggagaccgcacacgatggtatccagcggggagatgaagacctagagtcactttcaactgagcccgaatatgagcagcaaagcgaaatcagcgtaggtcctaaccaacgtcccgaattctttggctgtatgcactgcgagaaacttcgcccatggccaatggcgggactgcatatctgtttgttgtgtattcgggactggaagtggtgtgcaaagggtgcccacaatcatgccaaggcgagcttcttatgggatggcaaggaacacgatgagtgttatatgtgtcattttgcggacatctaatacttcttgcccatcgcggagactggatgtgtattttcacatgaagcacctatactttgagtgtatgggagctttcattcctggttttcttcttctccatgtagtatcttggtatcaacgtatacaccatttgagtagattgaaagagtgactggagattgaaatctgatagactagataaagagaaagtgacgggaatatcaaatatatctctttcggggtgtctttcttcatgtctttcgaggggttcgctaactatacacaacatacctagtcaataactggcctagagataggccaagaaatgggtacttgtgaggtttgcaacgtacttgtaggcatgcaaaagaatgagatgcatatattgagatgctaatgaaacaaaattgaaagcagaaggtctgaatgagtttggaggcgctgcacgtgacactcattaaatccatcaacctcggtgatctttaccaactctgcattcacaaaacatttacaatatcgtatagattatcctacaatttacaatcttgagcctgcaggttatgaattttgcctggccttgtctcaattcttcaatccatgacagtgtcctgccagaacttatccaccagggcaatgccaatatccaatcaaaaccactccgttcgggcccagtcagaatggcggagtcactccacctactgacctccacgcacgtatcaaaacctccggaggcgtcgactagtgtggaatctaaccagtgccaatgccatttgagagcaagcagatctcggacgagctcggactcccacatcggaaatctggctcgcctaaatcctgctgtgtcgttggctcgggatgaggaaccctccccttcatccctgagtttcccttgcccccatgatcggtggtacgcaacaatctgtccccgactcacgagtcaggaaggctccgaaccgccagtcgcggtcctgcaaagtctgccggctccggaaagtcaaggtccgtttacccccgtcatcgtgctcagatcgccccaggggtcgggacgctcccgtacccatttgatgcgtcccactggtcgtaacgcatcacgcaaggctaacgtggatcctgctgttagtgtgaccgagtcaagccctgccacgcctgctgtgcccatggctacccctccaaatgcgtgtatgagcatgttcccgacgaagaagctggccccatcagtcaggcggaagagattcggaacttacgggcggagatccgcgagctgagggggagaatagacgacaaacataatggtaaatttgcaagccccgcccactcagtcttttctctagcgtgtggcaaactcatgtggatggagaacaaatcgctgatgcctgtgcaggatctggggtccaggatctccagcgcctggaccagctcgagaacttatttgagtctattcgctctgcaccaagcccgctagtcgataatcttattcgcgatgttcggaatgcacatgtcggcctgaagaagggtttggtccctgttggaccatgggaaggcagggaaggtaagttatgtggtataacgattgctagaaagctacccgtgctgacagcctcagcgtacgaatcctacgattatccttcgcgacattcgtcactctcggttcggaatcgcgggttacttaattccccggtcgaagacttcaataatctgcgaagtgaggaagacgatgacagcgactttgaacgaatgtcacagagcagtggatctgactcgtctggcacgatatcggtcatgagcatgcaaagacccgcagtggatgtgtttgtcgagagattcgtggatgcatttagcccagaagtggatatgaaatctggacgagcgggtgcattgcgggctgcggctgggattcgaatgttctcgccactcatgacagacgcgttcgaggccgtctcggtggcattctttggtcgttctgtgcagaacaagcagatcgaggcgtccggattccgactatacccccgcgtgctacgtgcattgcaggatgcgctggtggatcctgaaaaatgcaaagcagaatcaacactggtgaccgtaactctcttgctggctttcgaggttggtttgataaaacactttttatccctagtcaatactaactacagcagagcgttgaacggactactcagagtggtgtccttgctcacgtccgaggagcagtgcgtctatttgaacatcgtggaccagaaaatcacatgtatggagttgaacatcttttgttcaccgaactccgtccatattgggtaagatcacagacctttcgtaatttcctcctctaattccaatggcttagattggcggtgctctggcagctcgacaaccctcatttctggcccgtgaagagtggaagaccattccatggtcagcaggaacgagtcaaaaagatattctgcaccatctacttgacctggctaccgaggttccgggcttactggcagtatcagatgcctttaaagaagcccaaatcacatctgtcatgggcgcacaagagatggctatcaaacagtctacgctttggaatggaatacgcgagcttacggcccgtttctatcaatggcaccaagagtgggttgtcgcataccctgacgggccaccgcaggaagccgaacaaaagggcgaccagggattcccaatcttccaacgccgcgacctccgcaccggggctactttcatcccaacaaaattcacatatccaaacctgctactcgcacaaaccatgtgtatgtactacgccgtgcgattgattctgtcctcaatcgacactcgaccagaggatcgcgtctcgcccatggaacagtatgacttgggttgcgggatctgtcgctccttggaattttatatcctcactgcgccgggcaacatgatcaatcgtcttgcattccccactcgagtagcgtgggaagcattcccagacggaggtccagagcgccattttatgattgaagtgctgcaactcgttgagaagcggcatgctcttgggctttggggcagttccatgccagagttatctaccaaagaagcctcgtcactgaatcgggtagtcagtagagtggacgcaaatactccccatagacgtgattttccgtagccacgatttaattagtctatatatataagggttgtgtggtccagctgtttcgaaataagtattgcgctgaggcgcagctgtcatttgaatgagtcccgatgcctacatgggcattgttctgcttaccattgaatagtataggggctgtgctccgcaccttccggctatattgccgcggtaataaaacatttgaacagatcacaatatatgaatctcagccgaaatgatgtatccaaagctcatttaccattctgactctgattggatgtttccgatggaactacatcgcattcgccctggctccaccagtgatcggcagcatcgaccactcacagggcgatataatcgatcaacaatcgatagttcgatggagattgaagaaaaaaaggagatctgcgtacctgtagaatcccttataaacagcatgcggcccggccccatgctagataccacacctgtcatacaaaatgccttcactcacgaagttggcgctctctgccctcgcgactaccacagtcgtcgcaacaggaatcaacgatttctcctgccaaagctcatacaacccagttgtcctcctgcatggtcttggagcgacatattatgaggatctgaactacatgcagtactggctgcaaacccaagggttttgcacatatgcccaaacctatggcgcatacgatggcttcccattgcttggcggtttgaaggcaatcaacgagagcgctcccgaaattgccgcatacatcaaggaagtcgtgcaaaagaccggcaaaagcaaagtcgacctagtcggccactccgagggtgctttccaatctctctatgtgcccaagttcgagggcgtcgcccacctggtcgacaagatcgcatctatcgcaccgcctacccatgccactacatttgccagcatttataacctcgcgtacacattcggcaatcagtcgcgcgaagtcgtggccgaagtgctcaataccgtcggctgccctgcttgcaacgatctcggccccgatggcccagccatcaaccgattgaatgacggtacccctattgcgcagcctggtaacagtgtcactatcattgcgtccaaatacgatgagctggttactccgccgtcgacatcgttcgtccacgaggaaggcgtgacgaatcgctggatccaggatacttgcccattggatcctgttggccacattggcgaggcctatgatttgaatgtctggcacttggtcaagaacgtgctgacctcgacggatgagaagttcttgtgcctgcttgggtcaccgggtaaataaaaagcttggggttgtgtggatggatcaattttactatatattactaataataactaatctttgaatgaataatacctatgttatcccatcattgttcggcttctcttgacttctatatatagtatagcggcagtggcccatagtacggactttatgactcaatttgcatggtttgtcttcagagattcagagattcataggcaattggggaatatccctctataacaagcgaaaagataccgggatgttgtgcccatactagattgaggagcacttgttgtccgggtgcatgtagccgtcgacaaccactcatctcatcaccccttcggacttccagatctgtgaagtcagagccccgaagaaacacctcagattgccatacatcactttattcgatctgaaacgattgctgccttaggcaccgtgagtttcttcacggactcggaactttctttctccgcacactatcttatctgcaacgcgcaaggattaaaaaaaaaccaccatgtcagagccagacaagaaacctggctctgaatccaccattcatcgaattcaagagcgatgggacagtctgaatgagatgttcgaaaacaccgacactaagcctgcagagccgacaggctctgccgatgatctcgaggcggaaatccgtcaagcccaagctcaattatcccgactgaagaagcagcgagagctcattgatatcaaacaaaaggttgcagaggaggagagagaattggaattggctcgcactcgactcctggccgcgaccaccttggaacttcccccggccacccctgcttcgactccatccagagccgattcgaagcagaacaacaaggctggtattgatggaggccaaaagaaggttcttgctgcccgatcggagcagattaccgccccagctcctgtgactgaagctgctgatcgtcgtccgtccgaggctaagccgtccgaaccgaagcctatgtccaaacccgtaaacctctcctccggtttgaaccttgagcaattgcgagccctcgccgcagctaccaggtcccccgccgcccaaacggttgtcaagtctgaatcccgtttcagtctgcaaccgtccgcccgatcttttcatcctgaatcatccgtccacgccccaccggtgcccaatgtgccggtatacaacggacgagctctgggagagttcaagaacttctctatgggtctagagcgacacttcgataaatatccggactggtataaggtcgacgagcgcaaggtcacgcgggcgcttaagcacgttgcccttaatatcgaggatgagtggaagcgacacatacgtcacctaccggccgaaaaggtcacctacggcaatttctgtaccttccttattcaccagctccagagcggagtgtacccggatgtcgctaggtcgcgctatatggatagctatcagcgaccggcccagtcggtgactgatttctccaactggatgcagcagtgggtgccgcatttccccaataacgactcggaacgtgaccgcatgcgccatctctttgaacatctgatgaacagggttcgcaacgaggctgataagactcatctggacttcgataactattacgagtttgtcgaatacctccagcgggtggaggattccatcggcagccgcgctgagtctcttggtcgccgggctatcaaccctcgaaagcgacctcgcagccacgactaagcggttcgacctagttgagcgagctccgacgaagctgacatcaactttattttacatctgcacacggggatagatcggaggtgggtggttttcttgctattcaatggggatttgccgtgcaatcttcttgcctttttccgtgtacataccggggcgttgcgaaatctttcaagcaaggtattcgtaacggctgtatcttcattcttcatcatctgaactatctctccgacgtctgtgatcactgcgaatctttcccagtttaacactagatcatctaaagcatacccgcaattctcctggcccgggctctcgccagcgcttcctcgatctgctccttgctcgccctgatagaacgcttcgtccatccattctcttttgtccaaccactagacttctcccctgcattcggctgatccccccagagacccttgtattcctcctcggtgaaatacaacgcctgtcgctcatggaaataagccaagatggtggcgctcgcctcgccgctgcagcaggggcagtaattgggatccccatgagggacgggaggtgccacggtcccatcacggagtcccttattcagcatcctgtagctggtgccgtagatttcgtagatcaggtcatcctgggaaacgtggacaaggcgcactttgaggggcgcgcggtcatcgtgacattgcgatccgagcttcagccagagggtgccgatgtcgttcaggttgccgatcccttcaaagtcagggtgttggacgaagtagccgtattcctgagggacaacgcttgtgagacctggcatcaggtcggcgatctcttgaatggccacggccagagagaaggtgtggaggcggtcgatgtaaacttggaatttggagcccatggtgtatgattcaagaattcagaagccgagaggatgtttctttccccttcccttcatgttaatgagactcttgtttgcttgccatttgctgaagccacgtactctttctgtactaccgaatcaaatgggttgcaggtgggaatagaagttgagagggacatggatggtggcagttgcctaatcccccacggactaaggttctccccttccacgacttcggcttcagaatctcatgtgaatagtctctctgtactccaatctccaatatttgtcctatattactttgcagtccgattggagcccttcacagcatatcctggaatatgtttggctactggacccaggaaatatgcaggtgtgctgacccatgagcgtgctcttattgctcagcacttatctttttcatctgaacgaatcgtttttcaggaaacccccaatagaatcacgagaatcacgaggtatacggatgatcgaggtgtttatagggggaaacccccccacttggcgggaccggcgggaatcgaaaagccatcttatctgattcccgactttctctttttatattcttagccccggggcttctggacttcgcaactctttgagagtctatccttgctcttgggaattgcgctctggtctggatttgtgttttggctgtttggcgtgatggacgtgaaatccgtgcctttaccgcctggtcaggtacgccaggtacgccaggcacgccagccacctcatcgatatgctcggtggggattgcccctggctgctgcggtattgattcttttagtctggcctgtcccattaccttcgtggaacgtggttgagcctttcgttccagtcacctgggacgaaattgttccttcgcaatcgctggagtaccacaactgcggtgatgagttccaatgcgcacgactggaagtgcctatggattaccagaggacagatggaaaaggtcgcaccttcgccctggctgttgtccgactgccagccaaggttccagtcacagatccgcggtatggaggcgcagttctgatcaatcccggtaagttgttttggactcgatatgacgatataagcttataacctaggtggaccgggtggaccgggaacaatgcaagcgttcgtggcaggtcgaaatctccagctaattgttgatgcggaggccgacccaacagaaaccagagaagagactggcaacaaatattttgatatcatcggatttgatcctcgcggagtaggatctacaacacctccagtgatgtgtttccctgatcccgtatcccaaaggaactgggagctgcaagtctctgcggaaggcatactgggaagtggatcggattccttgcagagaaattggcagcggaccgaagcgctgaactcgggttgttctgtattcgatatgtcgagtccaggaacagacgagccaatgatgtcctatgtcaatacgccgctcgtcgcacaggacatgctgaccatcatcgaacgtcatggagaatggcgtgagaaggaaggacaacgagcgcagacagctcacaataagtgccatgggctggatgaaggagacacaatcttggaacgcactcaatggcgtcgcggagaagagccattgctttattggggtcgctcatacggtaccctgctgggaactacctttgcctcgctcttcccagagcgagtcacacgagctgttctcgatggcgtagtcgacatggtgaagtactaccaaggaacaggaccgaatgttatttccgacgcagatgccatctttgatcgatttgcccagtactgtaatgaagctggacccgtgggatgccccttctatatggagggtggtccagactccatcaaggcagcatactgggaacttgaacggcagatcctcaacacctcaatccctgtcatggcatctgcagaacggggaccagaagttgtgacttggacagatatcaaagagatccagcgccttgccatctaccagccactccttaccttccctttcctggcagaaagaatgactgagttgggcaaagggaatgccgttcccatggctgacttcaagcatggtaggcacttcggtgcatgcccttccaacaaatgcagtcttgctggaccttggtcgccagaatgtgctacatcgcaggataacgtgatctacgctatggctgctattatgtgctcggatgccgaatatttgacaactatgaatactgagcagttccaagcgcaatggtccagtcttctggctgacagtgcagctctgggtgattattgggcgcaattgcaactgagctgtgttggatggaaagccaaggctaagtatccttttgcaggtatgtcctatcgtggtctctatttcttcgcagctgaccggcttagggccgtggggcgcctctaccgcttatccgatgctatttgtatcaaatactctggatcccgtgactcctctccacaggtatatactcgctcgtcgctagtggctttccaagctaacttgcccagtgcccagcacatgtccgagattttcccaggatctggattgctccagcaagaatcagaaggagtgagttatagttactcgcggtaatcccatgattcatccctgacatacttgatctagcacacaacactcacagccccatcaatctgcgtggcgaaggctattcgccattacttccaaactggcacactgccagtggtaggaactttgtgccaagccgacctgaagccattgcttggatctccgcatcgtcacgacacgatcagccaaagctttagcccagccgaccgtaagctgtttgaggcattgatggcggaggttcagcgggcgcctctgtttcctctttaaagtcccacaaactagatggaccgcgtaaccaagggttctatccaaccctgaagctaactatcacgatttgatgcattaatgatccagtgctatactagagtttagcgatttgacttggatgtgtttgcagttttatattagctattcttattttccttatcttactcagaatgtactgtttaatctatgccaactacccccaagtatcacaatatcacaccggagtaacgtccgcttgcggagaaacacaacctcggctcaccagccaatccaacatcgttgataatcagcaaccccgcttcgaggggttgcccggcattaagagttgttgaatgactctggaggcagattgtatttattccagtgtatctcgaccctcctcaatacagacgactaacagccatggctcccccaactgccaccgagaccctcgcaaacaccatcagcatgcaggcaccacagtcgtctcaggcggcgggtgccgaaaaggccaagatcaagatgcagatgcccagcatgcctattttcgaggataagatgaaggaacgggaatatttaaagggtcgcctagcagcagcattcagaatcttcggcgataagggatacgatgagggtatgaacggtcctacagcgaaatatcgagttaacaactaaaattcccattaggcgtcgctggacacatcaccttgcgcgatccggtggatccgacaaccttctgggtgaatcccttcggcacagcattcaagctgatgaaggcatcagacttaatccaggtcaaccacgagggaaaggtcattgcaggaggagagaatcggttcctgaatgccgctgcatttatgatccattccgctatccatgaagcacgaccggatgtgaattgcgctgcgcacagtcatagtatctatggacgagcgttttgctcgctgggccgaccgctcgatatcatttcacaggattcctgtgctttccataatgtatgttgtttccgatactcgccttgggaggccccagctaacacaatcaggacttggctctctactcatccttcaaaggtgttgtgctagcagaagaagaaggccagaacattgccaaagctctgggcaacaaaaaggcagccctgctacaaaaccacggcctcctaacggttggtaacaccatcgaggaaactgtgttctggttcgtgagcctggaaaaatgctgttacgctcaactgctagcggacgcagcagccaccggacgaggcggccaaacagtgaaaattgatgaagtcgatgctgcgttcacttacaaaacagtggggaccccgaaggctggctggttcagtgcgaagcccctgtttgatgtgatccacgccgaaactaagggtgaatacttggaatgagatatccacccgaataaattgccggggagattaatattttgtacgtgaattgcaacacgaaacagcgtttgtgtctttattcctaggatcttctctcctatttgttgtagtctacctcgaatactggctattgtcctgctgtcactacaaataggtaggtcccgtcaggcaaatagaaactccatatgcggggcttcggacttgactggcatatttgacagaaattaatgcgtcaatgaggatgtctcatgcattgcagttgactgtgttcaccaatcagcctggtgttaaccttgttttaaggtgaaacattcaaccccgaagagccccggaaggcgctccgcttttagttaattccaccactccaacagcagagatggtttatgtcttgtcggaggagactataaatccaggaagtgttcatgccaatatgaacccaaaccaatcattcttctattttcaagatcccccaggtgcagtgacgcttagcgactcggacaagtacacgtgcaatcttccagctcgtaattatcacaatgcactttaccataacttttctcgctgccgccggccttgccagtgcagggctactggagaccgtcatcaagagagatgactactggggtggcagtgtctcgctcggtccatccaagtcgaccattatcaatgccgtcacgacgttaatccccggagctgccccagaaactcagaacggcgagttattcctatggcctggggtgagttcccaattttccaaagggttctcttggatcactgagaattatagatgtccaacggaaccggtgacctggtccagaccaccctcgaaagttggcccagcaacgcatggtgcggagcaaccaccggccagtggtgtgtgcgcgccagtgtttttggcagcttcggtcagcttgatggcaccggatcccccgtgagcggaaccgacgaggtgcggattgagtacaatcttgagtccgatggacaaacctggaagcagtaaggatgaattcaatggctagatacgtcaccactgacatttatttgcaggactgttacaaatggccagactggtgcccttctttcaacttactcccacgaatctggaccctacatgcgagggtaagtcaatggcccgaatagtatttatcggggctatactgaccccagttagatatggcaccggaactgagtgtgacgacaactgctcaggaaccatcgcggcgcagaaatacttgaacacggttattactttggcctcggctgatactacctttggctcgacgattgctagcgcgggtggtgccacttatactggactttcatctagtcagggtgggaaggtgtggactatcacgcagattgacattccctcaatggattgagaggctgaggaatttgcatagagcctagtatgctttgatccaaaagagataggttcagctgggcgctgggatggagagtcaagggatgagattatgttgcatgacgcagaggcacaatacatgcaagagcaggcgatatgcgatcaggatagtgtagagtatctctcgcgtgctaattgattggggagagcatctgaagcacccatcgggcttgtgattgggccctctgggaagactcggcgtgagaattcgagaaaatggaatttcagctgtacttttttcatataaagaatagcctggagaaaaccaatcatttgacgaattcatcgcttctataatggctatctcataacatgcctgcgtatatacacttcgtcgcccatactcacccccgataatcaagcagcactttcagccgcacaggaccaggggacgctgcaccaccaataccatccaggtgctttttcgactggacataagcatcaacaaccttcttagcatcgggcgtgataatcgagcatcccttcccattagcctgacagatggacatgccatgcacaggttgattcgaaatctgcgcctgaatagccgaaacatcccatcccgaccagccattattctccccgtcgccaaacccaaactcgccccaggtacatgagtatccaccccattgatccgtgggtagatgatcaccaggcgcagcaccccaggcgccctcagagtcctcgtcaaatgcaacatagcgagtctcaccgggcgcaatagtaaatgtcagagcagagtggccataccatccggtcagcttaccgtcaggcccgaccttgttccacacaaccactgtccagggctcgtcgtttggacccgtgaactgcgccacgtatttgtaggcgtgtgcctcggtcggactgacattgatgatgttgcttccccaggggttgccaacattcccctggtaaaggatctcggttccttcgccttttgggagagtacgtcccccgaatccgtttgttgaaaattgaccgttgggtggggttgcggtccagttcactgcagtcggattgtctggctttgggcccgggaggatctggttcaccactgggacaccggggaggatttcacttggcagatctaaaaccgcgttgatgggtccgttgtttttgtgtgatggtggagatggtcgcttggcggggacggctttctcttcttctaacgagccctttggtaatgtttctgcaaggagcgttgctttttctgcctttgaaggattgtcgggcagtgtatctctaagtggggaagggctggctcctgggtagacggtgacctttacggtattcgttgctgttttggtgattgtgtgtgtcttgaagatggtagtggtctcctctggctctgttggcctgggagccggggtatttggctgagtgaattgaagttgagcggatctggtgtttgtcggagcagggagaacaggctcaggcttcggttcgccttgatgccaatgctcctcgtatgcctctgggcgcgcgaggccatgcacaggatgatcagtcatatatgatgcagcctcgggcctgtttctgacaagtgtgagagtgctgtgaatcgtgttggttggcgcgcagtttccaaaaacggtggtcgtggtcgtgatggtaatagattccaccacaaaatcatctagactggtattcacattctcccaagccatgtttcgccgctccaagtcttcaacaggcggcatcaagcgccgagggtgatggcgatgtccatgtgcaggatggtggatgccagcaaagacatacccgacgaagcctgcaagaaggacgtgaatagacacacgccccatagcaaaatacaaagattaattggcaatagctccggagtggattaggtagttgataattaacgcgatagatcaaggcgtcaatggggttatattccaaaaaaataagagtcgcgctcagttgatcgaatgcatgtcgatggcgcggtgttggcggttgtagttgttgtcaagcaaacacgcgatctggggacaagacttcgctttataaagccctttggaaaagggaaagacctggactgtgtatctggaatgccatcacgcgcttggcctttgaagggcttgaaggggacagtagcagccctgaattccggggttccttggccggcccttgggcattttcgagcaattcaatgagcgttaatgtgatggtataagataagatatttcctagacagcgcgaagagatcaataagaataggagtacctcttgggaaagtaatgttcgatgcgtcgacgttgacgttcaaccgaagtacaagatgccaatttagcccctcgcgtcgcattccggccctgaatcacattcgtccctcctatttcacgcgtaaaagagaatttaagggtattcaataaggacgtaactcattctatttaagcggtcgatattgagtctgtggataaatgacaatatatatttcaatgagtgtatagagaagtgctagaaaggagtgtatatcaacagaatataatggacaaattcttccaacaaaattcagaaaagcatacagtgaaaacataccaaccagcaaatactaccgagtgcctatttttctgctttctttattttcctttcaacgcaagacttacaatgccacttcttgtcccccttccggagagaccatcatgcgcaggaacccgaaacctgggtttgtggaggtccgacatcgaccaactgggtaccagcaacagtagtcacgctgtggtcaatgccgttgaaaacgcaagtagcgccctcggtggtggtttgaatgtgggaaatgctcagagggtttactacagtaattagtgtcttcggttgtttatagcggaatatatagatagacgtaccgatttgaatccattcaccattggatgggaaactctgggtaaactgagcatcggcagctccaatgaaagtgacatgcacttgatcaccatcggggtgatcagtggaaggaggtacaggggatgtacccgatccctggacctggcaagacgcagtaatctgggtctgtggagggccaacatccaccaattcggctccgttgacgattgtcacgctttgatcaatgccgtcaaaggtacactggaccccggcagtgttggatgagatgtgcgagatgctcaatgggttttctaaacaaagttagaatacttttagtccagcgcatgattaacaaggggcataccaatcgagacagtggacccgtcagtagagatgctttgagtgaactgggcgttggcggcgccaatgaaggtgatctcaacttgatgatctctttgtttcactggaatcgcactagcagtagccacataggcaacaaagagactgaagattgtagaggccttcatttttggacaaaagataattggaagattcaagattgttgagtgggtagttagtagattgttctggctgtgttcacacagatgagcaatgagataccgaagcgctttatatacctttttctctatacctactagacctccaagacaagcctgcagcatgataataacactggtttctaatattagatgatatgtatattcttttccatggtagaccggatagtggcgttaggatgtctaccatctagggcatagccactatgtcggtatacggagagaactttgaaatggaacaccccagatgactgtttcagatgatccaaggtcctcatttttattctcgtataactagtagagtgcagttgaagtccgggaatacaagttgagagtgatttgcatatttatttggtgatatgagtcaaatactcgatgattcattgctcggtgcatgatttacttaattactatataatatgtagttattcagacatgtccttcgaattattgaaagacacagtcaaggcgtcatctatactatataaatggccagttcctggtccgagagaccctgtgaccacccaccccatccccggatttttggattctcaaacatccacctgattgtgtctcagattataagcatctcacgtcttgtttttagttgtttttcttcgcgttttggcaatttccgcccggggcaatgatatttgagttgggtatgtcattgaccctcctttaccttcgtattcttgctgtttctgggttcaatgtgctatatataacctcacccaaccttatgcggagttacgcttgccactgatccgtgatatccttattttttggctactatactgaaaagttatgtctacaacatataagaggtagaagtgggagacaacaaatattcaaccaaccccacaatctaatccaccaatcacgacactccgtccagcttatcaagaatccaatacgcgctaaaccctttctagcaaaagatgcgccgtgtaaccaactggccaatcagatcgccaccggcgcgaaagatttacccaaaagggaaaccaagggggcctcttgcgaatataaatgcatggcgatacccatctttgcagaaaatatcctcccttgaacattatcaagaatggcgagccttcacccttttgacccaatcacaccaggggagatccagttggcggtctccgtcctggaatcagctttccccggtgtcaagctgcgctacaaacgcatcgatcttcaagaacccgccaagaatgaggttgttccattcctcgaggctgagcgccgaggtgaagtgcgcccgctaaagccggcacgtttgctgatggtgctcttccatcgattggacaatgggtctttcttcaaggctctgatcaacgcagacaccaagtccatcgtgtcagcgaaagagctgcccaaggacatccagggtccactggacattgatgaaatgatggaaatcgaggagctctgtctcagccatccagctgtcaaggctgagattgaaaagttgaagcttccggctggccacaccgtctgcttggatccgtggatctatggcaccgaggatgccaaagagactcggcgcttgttccagtgctacatgtacattgtggccaccgaccatccccaaaacaaccagtattcgctgccttgcaaattttctccggtgtttgatggtatcactcgcgaattggtccgtatcgattatctgccaggcggagccgatacccaaagcacagagacgcagccctggaagcaggtgcctactgtgcaatacgcgcatgacttgctggatgagcctctgcgcaccgatctgaagccctacattgttcagcaaccagaaggggcgtccttcaatgttgttgggaatgccgtgtcatggcaaaagtggcgtttcagagtgggcttcaacaaccgagagggtttggtgctgcataatgtgacctatgatggtcgcaacaccttctaccgtctgtccttctctgagatgacagtcccctacgccggtatgttctaatactctccttgtattagccccatctaatttattctagatccccgtgccccctaccaccgaaagcaagcctttgatgtcggtgacgtcggcttcggtatcacggctaaccaactgagcctcggctgtgactgtctcggtcacatcaaatatttcgatggatatcgcacggatgcccagggagcaccggttcaactaaagaatgtcatttgcatgcacgagcaggataatggcttacaacacaaacataccaattaccgcactggtgcagcgactgtcgtccgtaaccgccagctcgtggttcagatgatctgcaccgtcgcgaactacgaatacatcttcgctttcatcctcgaccaagcagccaatattgagctcgaggtgcgtgcaaccggtattctctcaacggtggccttcgaaaatgagaacggccaaaccgtgccatggggcacgaacgtcggaccaggcgttatggcccccttccaccaacacatgttctccctccgcatcgaccctgctatagacggctatcaaaacacagtttactacgaagacagcgtgcccatgcccgatgatgataataacccatggctcgtcgggtacaccacagaacagaacgtgattaagaccagcggcagtgcatcaaccagcgtcgaccgccatcgcgtctttaagattcggaacgactcgaaaatcaaccccatcacccaccaccccatcgcatacaagctgcaaaccatgccaagtcagatgcttctcgcacacccgaactcatttggctcgaagcgcgcccgcttcgcgacccgtcctatctgggttactaaataccaagatgacgagctgttcgccgccggcgagtttacaaaccagagcaagaagtcggaaggcgtggaagtgtgggctggacggaatgacgcagtcgaaaacgaagaccttgttctctggcacagtatgaaatcccatctaacatttcctgaaatggcagctaactgttcccagcattcggtctcactcacaacccccgtatcgaggacttccctgttatgcccatggagcgtgtcagtgtgatgctcaagccggatggtttcttcactaagaatcctgcactggatgtgccggcttcgaatcagtctttcaaccagtcgactttgcatcccgagccggcatgctgtgcgggttctcaggaacggggacaggtcaagctgtagataatatatgatagagggtgcgacctctgtaaataaatgcccccgcatagaagcgaatataacgaatttattccaatccaatgcacgctttgcagtcctttgtagtgcttctttgtggtgttgcttgtcgctgccgctcatccgcaatctagattatctggtgaggccagccgggctcaaagcaacgatatccccattgctgaagatgcctgtcttcaaggtgttggccgaagcaggaaagtcctatgtaggacctgccttccttcttgcatacagtacaccaaaatgcctcaaagacagcagagctaaggtcactagaagccatgggactggggaattgtagtccatgactgcgtgggaatggctgtcgaagttgtatatccaccttttgcaggttgacttcaagctgagacttcaattagagtggttgagcatgctccaatgaagatatggtgtttgaaaccaactcagcgagttgctacatctcaggtaaaccatccacaatcctgtccaacctgtcagaaattcctctgatagcagcactgacatgtaattatcttatttgctcgacgaagctaggaccggattggttattcctcaattattagtatggttaattataagccttgacacgatacagcccaggtaggtgctcaatagacgcctacgtattcatccagcagggtaattttgtaatatttcgggggctcctcataacgactaaaagacagcatggctaaaaccgagcgctcgaatagatcgacgacaccggattggcccgcaacgagacagtcaatcccctaatctccatatgaaagcaaggtagcattagtaaaccaagcaacgaccgaatgaaatatctagcgcctatcctggatagaaagcttctcaacccactcgttcgccgaaacaacatctgtcctatgtgcaaagaccttctccatcagcactcggtgcagctcctcatcacgatccatgcaacaatcctccaagactgtaacacggtagtccatatccattgcctggcgaacagtcgacagcacagctccactggtgattaagcccgtgacaacgagggactttgcatctgcgcagcgcaaaagcatatcgagttccgtagcgaagaaggccgagatgcgacgcttggtgaggatcacttctccagccacaggggagatagttgggtgaacttgcaccgacgattggccttcgatatattcacagcgtgcggcgacagaagagatagagatgttgtttacgttcttttctggatagccgggacggaaagcagtgacaacgtagataattttcacgttggccttacgtgcaaaagcgacagttgacgccaggcgttcgaggtagggctctgtgttgtcgaggcggtcaattatcccgttttggacatcgaggatgaggaggacggttgccatggctggctatcgatgtgtggagttggaagatattggaaaggtagagattgaacaaagatgagtttagatttaagagagaaaactcaagagaaagttgatatggaaaggagatgaaggtgttgttgttgttaagcggttccggtatcatgagatcccggtaccggcatgactagggatttttatacaaaaaaaaaaaagttaactaacgatcgctcacaatgttgttgaatacatgctttgggataccaagaagtgaaggcatatcagtcgagtcttcgtctcttaaccgcaaactgttctaagggctcaaccctttctttcagacgagcattctctttctctagatccccgcgatccaggattaagtcatctcgatccctctttcgtgctttagacgaccctcctatgcatttattcaagatgtctcggtgttacttggacgacatgaccgaatcagatgagtgtgaccctggagtgggccgagaagcgtttgacaacccaggggtccggcatggtgtgatggcctggtgattgtgtaaagcctcaggctcactgtcggattgatttccctccgactcagagctgtcgtcgccctctgggatctcttgtgattgtcgtggtgagggaggtgaatactcggaggtagagtgtcggctcatttcctccgtgaatgggatgacgggtaaaggaacacttgttcgaggtgtggcccgtgttctcgagactgtccaaggagtatcattcgagtatagacggctatcgagaatggaggttctatccccaggcgcggccgtagctcgattcccttggaggcagttgcgaagacggaattcatctagcggcacaaggcagctttgacgccaaaaatctgcagcttcttctgctcgcttagatgaagctacctctccattgatccattatgcaaactcctccacgttcaatgtgatggcgttctcattgttatcggagaatctctttctcatatagtcagtatagctcttttgcatcggcccaaaagcgatgttttcgattgggttagagaaccgttgatcgttctggggaaaagaaagacaagcgatcctgttttcccgacagcacttttcgaactccgggaagactatgcgaaatcgatgggaaatcagcagaattctctatgcgtcacgccgacctccgggtcgggtctctgactggaagacggtcttcagccagtcaagtgcatgatccgcctcggcccagcccgactgagtgaaagacaccttgattcgaccaaagttcttggtctgcggtggatcttggcttctgcagacaatgtacggaagcaggtgctttcctcgtgttgagcagcaatgcataacagatgagaatgcccgttcctctctcttgtggttttagttcgttggtcgaacgaacataaggcttgcctttcgataaatggtggtaataaatgcggcatcttccatagtatagatattgtcgttggaaacctggaatcgctgcttgatatctttaaatgcttgaaagaacttccaggctcttcgatcttcatgtggacctttctgtttccgtgtgtttcgctctttggctatgtaaccagcaagttcttgatgacgcaattagaacgccttctgccaaccgacgttgaggttgggtctgtaggtcgtgtagttgtggagatatgcattggctgtatcctttgccaagatgttataaggaaagaatccatgattcaaccaacgctctatccgctcaacaactgcattttcgtcctcgacaaagagagccggcggagccatgacaccagcttctttcgcagatatgcacaagcaaggtgtgtgtggcaagtgagatggaggcgcctcaaaagcgtacccaatattttggtctgacgactaagacggggcggttgaaagagacgcactgcgaagttcaggcaagaattggcctgaaagtctgacggagaaaatttgcactggaagtgagctctagggttgtaaacattgcccaagcctccacactgctagcccagcaaattttccggttcatatcattagattgctgcatttcgtatggctattcgagctttttttcttcaagaagtgtcaatctgggaataaagtggaatgatgctattccactccaggccatagtgacatttatccacccgtgtgaatattttcttttggcttctttttctcccgcgtaattttcccgtttggaattctgttgaggcagtgcccagagactggataatttgaaagtcagttcatgaaataaaatatcatggcaggtgttcagaggtcgtcaattcgtttttgaatggtcgcagtttactacatggagatatgaaattgaagcagcttttttagtacacatgtttcaggagggcaacatgaaaagaacagacgtggaaggacaaaaatacaaagaaacaaaagaaaaatggaaataatgatgcgctggacgttcatctgaactccagagaacctcggtgcaacgacagaatctcgtattcaacgagtccgtgatcttttggaagacgacaatggcgacgattgaatggtctcctcgagcttccagacgcaactagcatagctcaacgtcatttcctcccggtaccgtttcttctcggcggacgataccgtttcgtacctatcaaagcactctctaaaatccggaagcgacatcaccgatggtggtaggaagttcaatttgcgggacgacttgggggttttaagctgccttggtgttcgcgacggcgtgatagggacatgaaaataggagctttcttcttcgctgctcgattgctcgggctcgttctgtaccgaatcatgctcggtgtccgaggaattttcagaggcttctggttcttctgggaactcctgggtgggcgttcctcgatgctgtggaccttgcagcgaccgtcgcgaggatatctgctcttggtgaacaatgacagatatgggatcatcgtcttctccaacattgttctcgtctggtgagacatggcgtctcctagcacgaattgggctgttgggctcaacggtttgagatcgaatccggtcgcccgttcgacgtttgatcaatcgtgtacggctaggtggaagcaagcaagtaacaaaccatgcgttcgtacattccgtgctccgatcggggaatccgagttcacggtcaataaaggtcgcaaattgggatggtgaaatggtgtatggacatctctgtcgtaattgtttcttcatatgctctgcatagagcttatcaagggcgttgaagatcccattttcaaaggggttgagatattcactgcctttttttggaagacagagacatatgacatttctttcccagcacgtcacaaagaattcaggcgtcacgggaaattgactatcaatcaacagaagacgtctttggcttcggtctcgttgacctcgctcccggcgcccaaatggacaggtttccttctcaaacacactattcagccaatccagtgcatgcgtcttttcagcccagccactgctattgtacgatatcgtgattcggttttcgtgccttctgggcccttgaacttttgacgttttgaaaatgacatatggcgagagcggtttgccggtggctgggtaacagtagatgacagaggcaaatgcacggttctcagacgatctccggcggcttatgttcaaaggctgcttgtccttttgaattgtagtggcataccccgtgtctgagaggacataaatatgctcattattgagtcgatggtctgatcgaagggccgcaaactgatctatgaattcacagagcttaccatcttccacggcaggatctttatttgacggttcgcctttctctgccgctcgggactttttgaattgttcgtgaaagtcccgattgcgagcaaatatcccaccgtgacgactggtaccattgtctgagccaccatggtgcttgaaataggcgctggcgatttctgacaccatggattgctttttcaattgaaatccgtggtccttccatcgttcaacgtagtcaatgatcgctttatcctcgacagctgtaagactgtcattagatgtctgcggctcaggaagtacgccattgccatgtctgggccccagtgcttcggatcttctcctcatccttgccgccatggcgctgtgcgacatgatttctgaccgtatagtgtgactccggtccgcccacgtacatcactctcactgatcgtccaatcaagtcaatgttagaatggcccaaggacagttctgtctgaggcagttgagtgactgggatgtccgaacaacgacgaacagaaattgttcaatgaagttgctgaacacggatttctcacgggaagaacatcaaggcaacgtgggcgttctggacaacctgaaaaataaatgtgagcattgagagcgagcaccggcttataaacactgaccaggtcccaccttgttagctcaacaaaaaaattcggttcaggctggggtacggagtatggatacctcgtctctttttgtttggtcctagattgtcaatatgggtataaagtggatgcgattctacttcgagctagtttccatagtgacaagtatccacataatgtcgaagattccttctggctttgttttcgccgttccggagagtgagtatagcggtgagcaagaataagacagctcgtcggagaggtgcgaactgaaaaaaggtaactgccaggccaacaacgccgaggtgaggaagggaggctctgtgaaacagtatctgcagtgaccgtgtttcttaatgggtggtcatgtttcatgcccaccccggaagttttgggtgtcttgaatattcctggtgtcttcggatttcaaagttcttcggatttcagagtgttcggagtcttgggagtcttgggtcttcggtatccattaaaaagtgagctatgatagacagtgaatatcattggtgaacctggctgcacagcacttctgtttaattctggtggctggcgctgcttaaggaacaataatctgctgataccgccagtcccaagccagcgagtgtgcagtcatgtcggtctggtattccgatcgcattcgttcagatgcatctgcgaacttccgaatccttagctcatatgttgggatatcccaatgagtgatgtcggaccagaattctgacagctgtcgcgggccgagtgcatcccggggagctccagtgtttgtcagcagactgtggtcccgaggtcccactatccacagcggagatgaacgagccattctcgatagaagcagatggctatgagcatgaccgagagcatgaaagcattgatgataatagttgtcacctgtgcatctaagtcagttgctcgacatccaaaggtcaagactcatcgcctgcttacataacaaactccatgacgtcgatgccaaacccatcaaacgaagctcctcgcgcacatttgcgcctttcctatggctgccttcatcattgccaggacttggccaatgacacgtcaacctagttcacatgcaaccactctgctaacctaaaacaattaccatggctgtagcatcagtcccaatcactcacggcggtgacagtgagtatttctagctcaaggatgatgcttagatactgacaagactataggtatgctagactcggtcgcagcgctgaatggtcgcgtcttcgacaccgatcccgtcattacgtacatgctactagacatgtcgcagcaaaaaaggttggcttatctgccgacatactggaccgcgctcatcaagtcagccttgcttaatcgcgcagtgatcaccgaagccgatggctggaaggccgcctctgtcatgattccaccgggtgggtacgttgacaatgcctggactcttctgtgcgctggatttctgggcgtgctgtggaaaataggactcccaggcgtcaaggtaagagcccgatattctcgcagagggcaatcctgactgagctaatgattatctagcgcctttggttcgaattctctggtatgaccgacaacgcgaaaagacttggtctacgtggacagagccagtactactacgttttcagtctcggcaccgagcatgaacatcgtggcaaaggttcgacagccccattcctgactacgtcatactgcatctcttactgatatttgtccaggcctcgccaaagcgatcatgcgggatcaccagcaggccgctcaagccgcgaaccttccgatctggctcgaagcaacatctacagggtcgcgcgctctctatctgtcgatggggtttgaggaaatcgaagagattcggcttgggaagggcaaggtcgctgctgatgctagccctcagcctgatgggccaggagtctccctttgggcgatggtgtggtggccaaccccaactcctgaagctactccctaggctttacaggccttctacttatccgtacgcttattgctagcatgtgtacgtatccaagtgctcatactcatgctcactatgaacaacccgatttattcatatttatacattgtttcatgggcgatataatgctgctatttcaacccagctaacagtatacagcctggctgtttggttgactcgacaagagacaagctcagcaaacactctgcacgctgttcaaatccttaggaataaccccagccttgacagcatctgcaagaagtcagctatcatcgtctaattcttgacgaatggaaagaaaaactcaccctggtaagaccaccggtaatcattcagctgagatttccaggtccagaagatccatccctgctgcttctcataggagtgaacctgcgccgcaaaccactttccatagaagtcggtattcgaactgggctcccaatccgacgacgcctcgatatcatccggcacagaaagactccattcgccgacaatgttgggccagttgctatcgcggttatcgccgcaggaagtgctgatgtagttgtcatgcgaggggctaacactggtatcccatttgatgtaacgatgatcatcataggccatgtaggtcaagtcgtcgagatattcgttgggatcacccgagccccaggacttatccatcgtctgaatatggaggtagtcattcgaatcgacggaaagcttctgctcagcggcacggatacgctgtatattctattagtccatacccgcgacccgaagaccgaaaatactgctcacctcaacagcctgcgggtaatacttcgaccgcatagacgacgccgacgcctcatcctgaacaggctcattgacaatctccaacatgcccacattcctcatctcatccgtctggtagacaaggtccaccatccactcgagccacttgagcgcacgctcatagttgtaatccgtatagaagcccggctcagaagcatactggcccgtgaacgcattttccgcctcctgcgcaccgggcgcaccatgcaagtcgataatgatatacaaaccactgtcactagcccagccgcacaatttcttcagccgatcaagtccaccctgggggaaatgctcgctgtcggcatcaacgatgtcctcgcgcagccagtaaccaaccggcacgcggatggtgttcaagccatagctcaccatctcattgatatcgtcctgcgtcgtccaagacgcccagtggttggcgaaggcggtgttcgcggcgtcttggccgagtgaggaaacgcagtcgaattccgagttctttccgccgcaacccatgccgctccattcactctcagcgatccagggctcgaagacgaattgggagccgaggtttacgccgcggattttgccgttggaggatttgaagaggtttgtgccatctttggcggtgatggatttgttctcttccggtagccaggcgtttgtcagggtggctagggtggtcaaggtggtgactgcggcgaatttagatatcacacccatgatgttcgtttgtaaggggactgtgaatgagattaattggattggagaatggtaagaaagagatggatttcatcgcatataaatagtctctgtcatttcccatacactccacaatctagttcaatcgcatgttatagaggatgtcatgcatgatccacgatgatattggcgtaggatgaaaccgacgactttcctatttgggaaactgggttgagacacgctgcagggtccgggggttgattggcggcagatgctataaatattgacctgcttcctcaccacgatatccacttgagattatccagggtcgctcttaattaatccctcatcctggcggtggtcgatgtttgatcatctccgaacttgctggatttggcaaatgcgggcctccaatgtgtgggccaagatcggcaggcgctacaaccctggggaccgtcggacgttaatgaagacttggtagaagacatcttcgaggtttcttctggttgtcttttgctgtacgttcatagccaagtggtctatcaggttggccctttttgccgttgaagacatcggggtgtccttactatgtaacgtccctaatatcatcgtgggccaagtagatcgggattattaaagtcctacgtcgccaaggactgaaaggcgcataagcatctgactattctgttctattgttcgaaaaagcacttaggccttcatccagcttacacgaagactgtcaagacaacgttgattatcattagagaacattaaaatcatgattgcaatcgctgcaatcgatataagaaaatcataaaatatagcctcctcacagcgccttgagcaattcctggatcaaaggcaagaagcttgtcacgtcatcgatcagcacgcttgtctcgttgacgaacttaggagtaagcagatcatgagcattttccaagagcgcgccaacatccgaaatgacagacggcttgagcaacttcttcacctcgggcaacaaatcgggcacgtatccaagaatctccttgagcgtgctgaccaccttgggggtcaagatgccatcggcgttctcgataaggtctgcggtatcgtcgacaaaggcgggggtgagcaaagtcgtcgcgttggtcacaatgtatcccaggtcggtgatgatggtggtgttcagcagtgactttctgagatcggggatcaggggaatgacgtcgccgaggagatccttcagtccagtgacgatggttggggtcaggaggtcgtctgcgctgtcgaccagaccaatggtctcgttgacgaacttgggggtcaagagggtgttggcgttggacaggagagagccaatggcagagatggtgctcttgttcagaagcgacttcagctccggaagcaaaggaatgacgtccttcaggaccgacttcaacccactggccacctccggagtgagcaggtcgctggcttcgccgaccagtcccttggtttccttgacgaagtctgacgtgagcaagtttccggcgttgttcaagagggcctcgatcgaattgatggtttccttggtcaacagcaacttcaactcggggatcagcggagtaaggtcgctaagaagcgactttagagccttgaccaggtcgggggtgagaaggccgacagcctcggtgaccagagtgttggtatccttgacgaaggagtccgtgagcaacttgttagcgttgccaagcacgttctcaattgcgctgatagtggctggcttgagcaggcccttcagctcgggaatgataggagtaagctgagtgaggagagacttcagcccgtcaaccgtatccgaagacaagagctcactcgcttcatcgatcaaactagttgtctggttcacgaagctggtagtcagcaggctattagcattgccgaggagagtctcgatctctttgacattgcccgcggtgagaagactgctagcctggttgatcagaggaccggcctggctgataagcttgccggtagtcgagataaaggtgggcgtgagcagcttgttggcgttgcccaagagtgactcgatctccttgacattgccctcagtaagaagaccgcttgcctgattgatcagaggaccggcttggttgataagcttgccggtggtcgagataaagctgggcgtgagcagcttgttggcattgcccaaaagtgactcgatctccttgacattacccgcggtgagaagaccgcttgcttggttgatgagaggaccggcctgcttgatgagctggnnnnnnnnnnnnnnnnnnnnnnnnnnnnnnnnnnnnnnnnnnnnnnnnnnnnnnnnnnnnnnnnnnnnnnnnnnnnnnnnnnnnnnnnnnnnnnnnnnnnnnnnnnnnnnnnnnnnnnnnnnnnnnnnnnnnnnnnngcctgcttgatgagctggccggtagtcgagataaagctgggtgtgagcagtttatttgcattggacaagagtgactcaattgccttgacattgccctcggtaaggagtccactggcgtcgtcgatgagagggctggccttgccgatgagattggtggtctccttgacaaatgtggcagtaagcagcgtgttggcgttggtcaagagtgattcaatcgcttgaacgttcttctcggtaagcaggccactggcatcatcgatgagagggccagccttgtcaatgagagggctggctttgtcaatgaggtttgtggtcttcttgacgaaattggaggtgaggaggttgttggcgttgtcgatgagattgtccaccttgtcgataaactgactggacaacaacttattggccacctggaggagagttccaatctccttggtgttctcctcggtcaggaggctgttggcattgtcaatgagactaccggtcttcttgatgaagcttgcagtcaggaggtcgttggcattgcccaccaaggttcggagctggttgtcgaccgggggtgctagaccggtagagagatattcgaaggtgtcggcgaaattacccaagaagctggggttaagcaaactttcaagaccacttagaaggtccccaaggccgccactacccccgagcaaactcgacaaggcatctttcaagtctggcaggatatcagacgatgtggtatcgtcggaactactatcagagctggtagacttggtgcttgaggtgcctgtatcagacgcagcggaggaggtagccttgggggccgaggaggtagtcgccgcagcgaaggagctagttacagcagccgagttatcaacagttccagtcgaactggctgcatcggctgaatctgattcattcgcatcggcaccaagagcggtctttatgccaccgaccacggattccacagggttggccgtggtcgggtctgcggtatctgcaacagcggtggtctcttctgtcgcagccacagatgcagtagccgtgttggcagcattgacggtgtcggcggcagtagtagtctcggctgcgacattggcctgattgacattgtttgcctgagcggcggaggttgtcggggctgaggttgtcggagcggcctcgtctacactgttcacgacaggggtgacggattccaccgaggctgaaggtgcggctggacttcctgtcacattgactgcgaacaggagcgcggtggcgagcgttggcaaaagacgcatgttgtcgaatgagcctatctagctgtcgtttctttggttgataccttgtctaaccagtccaattggcgtcgattccccaaacctatcgttcaaaggtttgttgcggaacaggaagagccttcgaaatattcagaaactcaaccccggagcgagtcatctctttattcgcatttcgatggcactgatcgtcgcgcagcagacagggtcctagctaagcgcaattgcactcatgtgtctttctttgcgtgctccgtacggagtacgaggtagctccatgatcgccgaggaaatagggatcgacaccgaggcagagtagcaatggcctcccatgtgatgggtagtgatgagcaattctcactataactccgctcgatggcagcgtctgaaagcttgctgtcggccgtgcctggggactaggtagtgatcagcaccaaccgggtcaagctaataaatttgctcccgaggtccagccaggtacatgtgtttgctttgcagggggaaggctgggcatccgttaaggtaagccatcgcaaagcttcgtatattggcgtattacggatggacacgggatttccggggcaaaaggccggggcaaaagcgggggatgcattatatttccccacaagtagtcaaaatgaggaacaaggccaatgatggggtggaatggagcgaacgacaagaaattggaagaaaagaaaatgaggggaggttcggacttggggctgaaagaggaaatgaacgacatgtcgctgctcatcgctcatctccgcaagctgagcagttcccagatatcagagttggacatgctattgtcggtttcctttgtattggtatacatttgaaaattaacaagcattggggggttattcatgagaattcagatctcacctacggagtatacataagaaacaatcggcaacaagtacggagtactacaacatatctcctcttcaacgggacgaaagaagttgagatcgtcgagtgtttataacaatgtccaacttggaaagctaaacggtcatctcttgttccctttttgccatttgcttcgtttttattccagatgtccgtcagcctaccttaactctgtatcccatactacctagatctcgatctcttgtcaatgcctcataccttcagcatcaagcgcgtgtccaagtcactcgagcgtgactcaaacgacctagattccagaacccatgtgcgcacctccttctgattggccatgtttcccagtagtctaaacccaaagctagcccccataaactctgaccacgatcatgttgcagtcagtcaggtccccgtggcccgtgggtaaaggtccacgggtgaggagaaggcatgcactcacggagccgcaatctgacaacttccgggactttgtcgcttcagggttttgccaaaacatcccacagttcgtcgaccgtgctcgatgggccatgtgtcatcccaaaggatgagggacatggacactttccatcttagcgaaatcttagcggagaggaacgagcggagctgccccagatactcagcagtctttcccggtcgggttgggggattgaccagcagatctcctctaacggtaccccaggcccaggcacccgctcgacgatctggaatactcgccctcggtccactcctgcacggttgtgagaacgggggaaggtggtattctctttgataaagtgggtgtcgatgacctcatggctaggagattctctcccgcgctccttgagaagaaaccttgagccgagggacagtagcctcgattgctctgtggaggcgcacgctactttcgtaggcaggggacatcggacatccgatgatgacattgagctgtgattccgtatttccttggaatcgggatatttggtagattaaaatgtctcggactggtgattgaaggaatgagggagaatcacaagatagactggtcggttacgatgtgctctgtagcggtgagtcaagggactttccagggtatacgggcacataccacacggattggtacattgggcagtgacctatcgtcgagattaaaatgatccatctcggttgggtagattcagagcctcggattgtaattttaaaagtcggtgatggcattccttcaatggtcatattggcttcgaaatatgtatcgtggtttggagactaatgcaggacagccgagatggaaacttagtagcaagtgatatagtatgtgctataaaaaacaagtgtcgcactatccattctgctctaaccgtcggctacttcaaacatttcatactagaaggaaccgccaagcgttgggcatcaaagttgctcccaagggtttattcctgggctacttgagtccttccaatatttgaaacccccaggattgcaccaactgctggtctaggatactattagttactcaggatagccgtgtttgaaacaggactgttacggagtagtgttaggcgcacggggttcaatgcataggggtattataggggtattagaggagtatctgaaccccaagtatactacatagtatcctgtccatagttcatatcggttcaacccgagatacccgaggccggctccgaaatatgatgccggcagtcccgggtccacctagaaatagatatcatatcataatatcataatagatgcatgttgctacagaagatagacggggtactccgtactccgtctctaccccgtgtcctcaaacaacatgccattacccgagatggtccaatgtcatacgaggcaggtcagcctagatcctccacatcaccccatactcggccaagtggatcaacatcagacgataccttggggacaaacgaacggggataactcggtcggccgaaactacgactccaccgtcttcggatcttctgtcagataagtgacaagccgaggtcagagctgttgagatcgactgacgtgatttgatggcccagctatgtagcagtaccggtggggaaaaggatcggccgaatatcccggcactcgagcaagacatctaaatgggaatgtgccggttctgtgcacttgacttcttcgactttcgactctcgactctcgactttccactccatacaagtttgactgcaaatatccaggaccttccttatatttggaaggatttatatatcgcattcttccccacggggtacgtgagggaaggggtatgtatatagatgctgacctaggaaatcccgaggtattcgacgattgtatattcccgacattccacgttcccacgttcctcaaacgccagcacgggaaaccgaagcaaagcagttacactattgggttccctccgctcatgctggggaacaacatcacgtccgaaacccgaccaaggatattccgcatgctcaacccttccatccgctgcagacctgcattggtggacggcatgttggggctgggttcgagagagggaggggaaggcaacacaagcggggaatatgtggtgctggatgctggccccgtcgaacgattcgtgcgggcgctgaaggcctggcggatctcacgcagggcacggagcgacgaagacagatgcttggcggagtcggtgcggttgttctggtgcatctcatcgtctgcatagacatggtccgctagaaccatctccagcctgtcgatcagctgccaggtctgggggctgtcgtcatttgcaacgagcagaaacgccgatgcaatgcttcgctgcagactgatccaggaccgtgagcagtgggaattgatctcgtgcaattcgacaaacgcatcgattgtgttgaccaggctatcgatgcagtcttcgcggatcattgcacgacgcggtgcgtccaaatgggaatgtgggtcgagggagacgcgacacaagacagagagaagataggaagagtgcaggcgcaattcggttcgctcaatatgctcggctagagaccgacagttgtcgcgataccgcagatgagaagtcgcttcagcgagcatgcgttggatttgttgtttatactcccggatctcatggacacgtaattgagatgatccgggatacatgcgcgaccgcaggacttccaatgacaaggatacaatgcgacacagagtctcgaaatatgagcggtggcccggcattgatttaggatcgaatggaatttcgggctggctgaccatagtgatcgacggtcggtcataggcaagtgagaaatggctgttctgaaaggccatggtccacctaggaaatgtgagctttagattaaccaaaagagcaaactggctacctaccagacgcgccttcgcacttcctgctccgcgagtgagaacccgctcgactcaacatggagcccgaggacaagacacattcgctccgtcatacctgatgttgtgttagcttgaccatctcattggaaacacccccacgtaccaagcaaagtgtatgatgcacctgcattcatattgtatgaaagtacattgctaatgatgagaagaatctgaattacttcgacactgggttgcgagacataattcaacattcgaagacattgatacgcacacgagactggagaaagtcagtacagcacttccgaccttcctagaatgcgacgcaccgtatacccatgaggtcaactcacggtcgctttccgggatgccagacagctggcaccccgatgcaagaaccgcaaaaaggagactgagaaaagccaacggcatcccgaatggtttcactaatccgttggcatcggctttataaacaccccctgctcgtcgtcgattatcgagaagtcgtttcgtatgtcgtcctagttgtgcagtgtctgaaagtactgggtataaaactgcaccgatatcttgataaaacgccaggaacctgacagttggaattagcatgcatcgcagaataccacagatctccggcttactccaaacaccggccgtcttccgggagaaccgcacaaacaccggcgatattgaaggtgaacgggtcagaggtccacaaatccacaaaggggtatgcagccgactcattccccaaagccagttcggcaagaagatcatcctggggcagcgcctgcgctgtgtcctccgactgctttgatttgtccaaaatatcaaccagggccgaccgcgaccccagatgtaccgcgcccgtcttcaagacattcgacccgtagacaccttccgaccgggtggaaccttttggttcgaccggttctggttctggttctcgctctggctctcgctctggctcgggcggcttgtgagtcgagtgtgtttggaagagcgagtgcagactgccgaggatctgttccattgcgaccatcttgttgttaatttcatcccactccgcctgggagatatcaattatgtccggtaaatccggatcggcgctggtgctcgaggggtgatcggcatatgagccatcggttgtgggagctgagctggtatacggggggttcgtgggggaggcgaacgtagactgctgtaatggggtggaggaagcagtggcgacggtagcaggagggggatgtttcgtagaggacggacgaccgtaggagcaggggaagtttcgtttggtgcaattgccgcaggggacgttgcgatcgcagcggaccttgctcgctcggcatgggagacatgtcttgcactcgcgcgggcggcgacggatagggtaagttggcataatgtggattttgtactctttttatttcttcacaatcggatccccgtgatcggcaaaggaattatgggaagggctgcctgcggcgaccgggcaataagagggagcggcataggaagacgtagatcgaggtgagggctgaaaatggacagctctagtgctgaccagtcggaatggcgccaataatgaattcaatagaaacgaccggccctggagcgattgatgcgtccaacagtgcctatcatcggaggtccgtgagctgccccggattgtcctgcgaaacagggaaacccttgggaacaaaataaggaatgtgaaaggacacttcttgacagtgccaaggtatgtggagaattgggattgtcggattgggaggtcggattcaatcttggaaggtgaagggtggaaaagagttgtgaaattgcccagaggcagatgatttcataacccagcggatgttcccgttcgctacggatgtgacctgatttggttgatttgtggatttgttgatttaatatacttcgagttaccttgacataggagatatacttgattactttcattggtagagtcatgtaaatggtcatttctaaagcgaataaaaggtatcactggtacatcataacgactaggaaatcaaacacgtatatgcctctatcattcacgccttagacttcttctcagacacctgcgggaccacccaccagtcatgccaacgaaacttagatccaacctcgggcacagtcacctccaggttgagagtcttatcatcggtagatgtcgcagagagagccttcttgaccgcatcaatagcaagactagttccaatgcaggcacgcatggtgttcttcgtgtcacgcttccaatcctcttcaatggctgccgatttcggttgagttggtgcggacgggtcatcaataaatgtcccattggcaagggtcgcctcccacgccttgcgcgcttcggtgatggctttcgaggcacgctccaaaatggtggcgtcggaatcaccttcgagagctgcctcgcgctggtattcctcgtatggaaccaattctggcaatgtgatagggatgaacggtttcatgcggatttcataccggagtcggtcgctggaatatgcttggggagacgaagcagacgggagcacattgtgccgggccaatacaacatacaatgcatgtagagcaatcgcaaatgcatccaccgcaatgatatgcgtagtcaacctctctagcgcgtggaacgatcggtggaacgcggacgcatgtcgagaggaactcccagagtgctcgtcagtagacatcaagttgcgttttcgtgcagccacagtaaacgtgcgaatgcgatcaatatggccgagatgtgtagagcaaatatgagaaagataccagtacatgcccggtagctcttccggggagtagattgacaactcaaagcccatctggagaatgagtcggaactggaggagcttctggtgataggcccagctactaagtgggaaagaccaggtcggttcgccgccctggaattgcagaggtggttccccactcaaagtgcggagctcgaggtccatttcttccgcctacattaagtcagcattaatactcaaatagcaaagagacacgaggcaggactcacctcgatctgtagattatcccaatcgacgagagtatggcagagtgttcggcgcatgcgacacctattgagacatgcgcatcgcacagtatcaacaaacggctgtgagggttagcaaatgggacatgtcatgatctacatgttcactaacctgggcgaatcgcttcatgaaaccatccatcttccgagcaatctggaaccgaggatcagacggcacttccacttcttcagtgttagcctcgagtaaaatactagcaggtaagacgagttccgcgagctcatcgtgtaagaactctttcacaggtacggtaccgaggatcgtcatgttgctgacaatcaatgcctgaagaagacaacgaatataaattgacggctgtggttttcgagagagcaaagtccatacggcagtctgtaaaacaagttagtgctaggactacactcaagttcaagagtacataccttgaaattgctgggaccggtataatccagcatctgctgcatgtctatcgcatcctggcacagtcgtttcagatgtgtgagcgcgtcatcggaggtaatattaaccatcggacgaggcggcactgtgctagccagctttcgttgaatcttcaagctgaaggcatctggcaccggctttcccagagcgactgtctctgtcagaggtcgaagttgagttatacacgaggcgaaattttccacagatctggtttcaagaacttcaacatcctgatgtagtgcagacaagaactcacgccgaaacactagtctgcaatggatggcatccttgagcttctggtctatgtcagtctgctccgcaacccaggcaaccgcctggtccagcaggcggtgaaagtcggatatattgaaggcagacagaagattgcgattgtataattgactgacaaaatcctcttcctagttgggtggcattagcggcagtcaaagaagttggcgagccagcctactaacctcataataatattcagtggccactcggacatgcacaaaatcacaagctttcactaatgcaagacaataagctctcaagacgaggttaaccaaaggagcatcacttggtacacggtcaaatcgagcgtcgttcatggttttgggcaccggccacagtaatttatcgagataaattgacgtgaatagcgtctgcgatagaggatgtcccttatgccacgccacctgcaattaagtcagcaacctgccatcttcatatgtgcgatattatctcccacctcgtggcatagcaactggtccatcaagccaacgacttcctctggtgtcaacggccgccgtacgtcgtagtcgtcttccagcgcctgcgcaagattttctccgggggctatgtagccactgtccatccttgagtccataatctgtgcgggttcgatcgtcgtcagctgcaattcttgtcgcacgtttcacatctggtgagaaagccgacacacctccaacgcgcccacagcctcgaatagggtgaatgtctcatctttcacgagctgccctgcatttagctctacaagtacaaatgattagacacttaatcgaagctttcgggtagtatgcttactcgctgcggcttttgtgaattcagctgtaatgtcgcggggtgcggactgctcaacgaaccgcggacggcgaaagcgaatctcgttattcggcagcatcgcgaataagttctttccacagtgctagttctattacaggacttcaaacaagtctcgtgctgccggacgtgtttcgagagatcaaatcgagggggaggcggggatgtgagcggaggaaaaagcgagtcgggaagtcgacaaccgggcctagaggtgacgtgcaacatctgaccggccacgcccgggcaatatgagaattcttacagaagttttaactaacagcttatgggtcatgtgaaaacaaagaccagtgggatttctaagctctgcccaaccagacaggccggtattgctacacatgtacatttcaatgcctcccccggaccaaaaactcgctcaagtccgtcacactcgggtcctgcatatctccaagctcgattctctcaggttatgggggaataaggcttatttctcagcagccttggcgatggcctcgttgttggcctgggcgagagacttcacttcaccctgcttgccgttctgttcatcggaacattgtcatcagtcaagattccgcatagagctcgagaggttcacttacatcccacttggcgaaacggaggtccatgactccgcggcgctcagaggcgagacgaggggcttccttcaaggagcggcgcaccgtgcgggcggcgatggccaggtagcggttgtagctggggtcgaggttagcattgattcgaaagagcattggtgcacgcgtacgtcaaaccggcggctttccaggcagcagtcattttgaagagaatgtggaggtatgattcgattgaaggggtgaaaacggttcgggtgagtttggaagcgttcgacttcggaggatcgggatgacaggatcacgtggggagcagtctacctttggaaggcggtggctagaaaagcggtgaggatttacgcggttggaatatttgatgcctataagtcacgtgatattggggtaggtctggtcagggaaagtatttatccgacgtttatccgacgtatattgatcagtactagtatcacctccagggcttcatgtcaccagcgtttatttcgaccacatccttgtacaacgaacactacaccacgccacacaccatgttattctaccccaaaatgcccgatatgtagaaatatattgctattcgccattgggtcaataatacttgcattctgttcttttcatttccttctccgaggtggtggatgtttatatagatccttcgtcacatatgtaatgatatccttatgcaaacaacattatacaatgcgacacactatatcatccagccatacatcatccgattcgtaaagttataatcgctatgctgttggctcatcaataattctattctgtgttcttcggttttttcttcgagggtggtggggtgtagaagggttgtggtgaaattatatagatcttttgtaccaagaggggcaaactgcgtatcgcctccagctcgaatgtaagtctcgcagccacgatgcgtcttcgcagcttcgaagtgctagatcagatggtgtatcagcacatgtaaataggaatatatactccaagaagcaggcttgctgtgcacaagaaggattacaatctgcctgcttttggtgcagggtatgaaaaccttccattcgggttgaccagccgtgtacaatacacgtgcttgacctcgaaaccaagagcccccgaaggcaacaacacaaaaatgtttcaaggcggtccattgcttcagagcatttgctatcccccaccactcctcttggtcaccatatctctcacttgctcttcattctcatcgacattcatccatctcccatcgtccacaacattccccatctttctgtgctttgataccaaagcatctcgaatcgaaggtgcctttttatcatatccaccaggtgagtagcccagttttgtactggttatagtccattggtttccctagcacatccccacttcctaccatagagctattgcttctgtgcatcattggcatgaggtcctgtggcacactgtggttgttgagagctccgctgccatccagtgcttagccacgacccattgcctttgtcgatgatcgggttatgcatatcaatgcccaacatctggcaagttcatctcaattgcctggcgtctgggcatgagtggcacaagtcgtccaacaagttgagaatcttgcaattttcgatcggataccgtcatccccagtacatggcattggggattggtggtattaatccacaattgcatgagaccatcgttggtcccgtgcccttctcagaaatagaggatgttgaaatcgcatgcagcatcaatagggtatcggccatcagttgctttgagcatgggcattctggaaagcttctttgggccacgctctgagatcctgcagtaatggtcagccttgtcactatctgcatatttatcttaacatatcctgcttgggcggtgctcgataccatattccatccaaatgcatactgcaaacccattctcattgtgaacactgtgtgttcactgtgtttgatccatatttctgctttatcggagtttgacagcaatgcaacaacacattggccgtgcccagtcacctacctcacgccccgtccatacattccagattcattttcttcttgtgagcacaaatgctaatgatgatattgtgcagaaggatataaaggactcgtccatccaacatgccgatcaagaaaaaagccggtacccgaaagcgcgacaatgaggcggaccttgccgagctcgaaaggctccggaaacaagttgctgaacagagcaaggcgctagaagctgaagaggcccgcagggaggaagagagccaggccaagcgccaaatcagcagccggcgccaacggacactggttcgctgggatggtaagttcccaatcttgttccgtctttctattcggggatgttgtccaactgggaacatcatggaaagatatactgttgtcacatagacttgtattcaagcagaggatttgccaatggattatgctgacatttgactgaaatagtggataccgacattcggcttctgttggccatccagtatgcctgcaataagctcagcgtgaagattccctggaaggaggtcgcggaagttatgggagagaagttcacggagggtgcgatcgttcagcatttgtctaagcttcgcgccaagcgggaggagcaggataagccaaatccgcctccactgaaacgtgcagcgagttgctataacaagaacgacgcaaacaagaaggaggcgttgtctcctccaaaggacgaaccaccgagcactcgcagcggaaagcgccgacgccgttcgccgtccgttgaggaatccgacgacgatgtgtaccccatcaagaagaaacagcctacaaagaacaagaagaaggacaaggtctccgctgctcctaagctgcgtggagagcgagaacaatccgagagcggtgactcccggaagctgctgtgtgttggagcggaatggctgcgtgacttcgctggcgacgactgtgagattgacgacgaatcggctagttctgaagagaacgagaacgaggactcaactgaaagcagccacgtcactgctcaagcggctaagaaatcaaagatcgtgacactcaagctaggccgagagcgcctggcaagtgttgaccgctaccttggtggctctgcaactttccgggagcctatggcctcaaccaacccgttgcgcgctatcaccaacatgccaccccgtcagccatcctaccgcacttacatgcactccgttgggcctttttcgcctgaccccaccactttgtttgggaacaacatctcttacccatccagtggcccaagcccatttgacattccgatttctgacgctgatcttgctggagcctgtgcttttgatgatgtggatctcacagcaccgtattcacagtttgatatcccctccgaattgcaatttgacccaatgtgcagctacctcaataccagtggttttgacaaccagttcattcccgacgatgaactgtttgcgtccgttcctgacgtagagcctcctcggtactatgggtacgggggtgaagaggtccaggaattttaatttcctgggccgatcgtcatggttcctggttgctctgatacttttcaatacttttccccagtgctttccgaggcttttttcttgtttcctcctttcttggccttttctttgcttttgtttttccttttttccttttctcgctggttggtcggaggagatgggtgagcatcgatcccgatttaacggtgcaactccggataataattcttgcgtggcatggagtcatgtgttatctgaagttgtaccctagcgcttctttcatgcgttgctcgttggccccctgcggggagcccggtagttagttaaatcaataagagcatatcgtatcgtcttctttggaagtaccttgtaggttagtggtgggttctcactgatgataaaagcgaagtcgctaattcgctagtatagaaggttgccgaacaccggatatacgtacggagtagctttccgaggtatatatttgaacacatcggcttggacctatgcatcacgtaggaatactctttcttcataacttttgaatatagactagatgttccaaactaccattctccatcacatttccaatctaataatctgctataacaccacaatatctacaatatttccactgccgatctaggtccgttcttccggctcacgtgatggttctagctgtttctgccgccaagctctggggatgaaggaagcgcctggaaaattttcgagactttagcttcatctctcccccagctttctccatctcttttctttttcccacttcaaacccccgatctctcctgggttgttgtatttctctcttcttttaatccttttaatcccgttgtttccagccatgcagcgcgctctctctacccggacatccgtcctgtcggccgcttccaagcgtgctcctttctatcgctcaacattgaacctccagcagcagcgttttgctcacaaggtgcgttggattgacaattacccgcgggatcatcttgttctgcaattgacaccgtgttccgtccattccgaagcgtttggccgttccctcgctaacagcaactaggagatcaagtttggcgttgaagctcgtgccagcctcctcaagggtgttgacactcttgctaaggctgttacctccacactcggtcccaaaggtcgcaatgtcctgatcgattccccctacggctcccccaagatcaccaagggtaagattcatatcaaaagaaacacttggccactagcaaaaatactaattattccctagacggtgtaactgtcgccaaggccatcactcttcaggacaagttcgagaacctcggtgtccgcctcattcaggatgttgcctccaagaccaacgaggttgctggtgacggtaccaccactgccaccgtcctttcccgcgccatcttctccgagaccgtcaagaacgttgccgctggctgcaaccctatggacctgcgccgcggtatccaggctgccgttgaggccgttgtggaatacctccaggctaacgcccgccctatcaccaccggtgaggagattgcccaggtggccaccatctccgccaacggtgacacccacgtcggcaagctcatctccaccgccatggagcgtgttggcaaggagggtgttatcaccgtgaaggagggcaagactctggatgacgagcttgaggtcaccgagggtatgcgctttgaccgtggttacacatccccctactttatcaccgaccccaagtcccagaaggtcgagttcgagaagcccttgatcctgctctccgagaagaagatctccgctgtccaggacattctccccgccctcgaggcctccaccaccctccgccgccctctggtcatcattgccgaggacattgagggcgaggctcttgccgtctgcatcctgaacaagctccgtggtcagctccaggtcgccgccgtcaaggcccccggcttcggtgacaaccgcaagagcatcctgggtgatctcgctgttctcaccaacggtactgtcttcaccgatgagatcgacatcaagctcgagaagctcacccccgagatgcttggctccactggtgccatcaccatcaccaaggaggacaccattattctcaacggtgatggtagcaaggacaacatctcccagcgctgcgagcagatccgcggtgttatggccgatcccaccacctccgagtatgagaaggagaagctgcaggagcgtcttgccaagctctccggtggtgtcgccgtcatcaaggtcggtggttcttctgaggttgaggtcggtgagaagaaggatcgtgtcgtggacgcccttaacgccacccgcgctgccgttgaggagggtatcctccccggtggtggtaccgctctgctcaaggcctccgccaacagccttgctggtgtcaagcccgccaacttcgatcagcagcttggtgtcagcatcatcaagcgagccatctgccgccctgcccgtaccattgttgagaatgccggactcgagggctccgtcattgtcggcaagctgaccgacgagtacgccaaggacttcaaccgcggatacgacagtgccaccagtcaatatgttgatatgattgctgccggtatcgtcgatcccctgaaggttgtccgcaccgccctggttgacgccagcggtgtcgcctctctcctcggtactactgaggtcgccattgtcgatgctcccgaggagaagggccctgcccctcctggtggtggcatgggcggtatgggcggtatgggtggcatgggcggcggcatgttctaaagcccctgacccgattcccctaaagaattacctcgagcgctcttctttgcatcgtagcctgttctgatactcggatgtttgtgtaatgtcttttcttttgtgtcttatttggtgttcatcttctttcatgttttttccccatacctgtattcttttggacgtgttctgatctccgactctctctctcctctcctctcctccctggggcttgacaaaacaggttcctctgtactatatcatgtattccaataaagtcccatctgatacggcttgctgaattatgtctttttcgggatcgacaatgtccccgcatagatctactgaagctcctaacagtctcgctagaaagtattccctacgaagtacaaataggggaaatattttcacgtaccccatatattagcaacccaactgattggctacgcgggtcggctgttttgtgcagtctatagagccataagaccaaggaagggtctagactgaggcgacgggcgaatacgacttcagacgcgcatgatacacgcaatgatgggaattaatagcgatagagaatatatgttggagtaaaggattccaatagccaacgtaagccgatgtaagtggttgggcaccgcaattaaccatgggtactgctgttcttctctcgggctcttgaatcctctccgcctggaccctttccctcgcgtcaccagatcattccgccattccagtcctgcatttttgtgcattcttgtacctgatctggattcgctctttcaatccaagtttcgttctcttcctggaataccttggccatcgggaatgcataccgcgcttgcggggaacacatcgtgttcgcccctccgtcgcctgtcaacgtaggtacgatcatgactctctgatattctagtctgtcgccaacttgcttttatagtcactgcgcgcttagagagccctgagccaatttgaatcgaaactagactgtgactgctgccggcaatggctgccatggtggatgctcgcctagctctggtgagcgatgcagatctcatgcaagcacgagcagctcttcagcatcagcagagtccagaagtctctgttccccgcgaattcatctctctcatcgtcgaggaactcatctaccgccgcgagtcgcattcctccatcgcggaaatcgaacacgaacgctcaatcctccggaaggaacttcgcaagcacacccacatcaatgaggcattccagaaagaactacgggagatcggcgagatcattacccaggtcgctcatggcgatctatcacagcgggcccgcatgcaccccctcgagatgtcgcctgatatcgctaccttcaagcagacaatcaataccatgatggatcagttgcaggttttcagtcaggaggtatcgaaagtggccagggaggttggcacggagggtgtattgggtggccaggcgaagatcgagggcaaccagggaatttggcatgaactgactgtcaacgtgaatgccatggccaacaatctgaccacccaagtccgcgatatcaccaccgtaacgacggcggttgccaagggtgatttgcagcgaaaggtacaggcggattgtaagggcgagatcttgctgttgaagaatatcatcaactcgatggtcgatcagctacgggaattcgcattcgaggttagtcgcgttgctcgcgaggtcggatcggacggtgtgctcggcggccaggctgttgtgcacggcgttgagggtacttggaaaaatcttacagacaacgtcaaccggatggcatcgaatcttacacagcaggtccgcgaaattgccgatgtcacaaccgccgttgcacgtggtgatcttacgaagaaggtgaccgcggatgtgaagggcgagatcttggatcttaagcttacgataaatgcgatggttgatcggctgaatcagtttgcgttcgaggtcagccgagtcgcacgtgaagtaggaacagacggcacgctaggtggacaagcgcaagttgaaaatgtcgaaggtcgctggcgtgatttgacggacaacgtcaataccatggcgcaaaacctcactctgcaagtccgacaaatctccaacgtcacccaggccatcgcgcgcggcgatcttagtaccaaaatcgaagtccacgcccagggtgagatcttgactctcaaagaaacaatcaatagtatgatggacgggttaggagaatttgcgggggaagtcaaaggcgtggcgagggatgtgggtgtccggggtaaactcggtggccaggccaacgttgcgggatctcatggaatctggagatcgatcagtgaagatgtcaatacgatggcagacaatctgacctctcaggtccgtgcctttggtgagatcaccgaggcggcgatgagtggagatttcacaaaattgattaccgtgtctgcctctggagaaatggatgatttgaaacaaaagatcaacaagatgatctcgagtctccgcgacagtattcagcgcaataccgctgcgcgtgaggcagcagagctggcaaatcggagcaagtctgaatttctggctaacatgaggtatgttgatcgttttactcggtttcataggctttccttttctttcgcttgtgctaactacaatgtagccatgagatcaggacgcccatgaatgggataattgggctttcgagtctggcactcgacactgacgacctccaagctcccgtgagagagactctgaatatggtacacaatcttgcaattagtctcttgactatcattgacgacatcctcgacatctccaaaatcgaggccaatcatatgattattgagaagacgccattcagtcttggtgcaacagtgtttagtgtgctgaaagccctctctgtggaaactaatgagaaggccttgggtctagtctacacagtagatggagaagtaccagattatctgatcggagacgcatatcgactacggcaggtcatgttaaacctagtcggcaatgctatcaaattcacagaccacggcgagatcagagtcacggtaaagcatgtacaggacgacaagtgcgcctcagatgaaacgacattccagttctcagtctcagaccctggaatcggcattgacgaaagcaaacttgccttgatctttgacaagttccagcaagctgatggatcgatgactcgtcgctttggcgggaccggtttaggcctcgcaatttcaaaaaggctcgtttctctcatggggggtgacatctgggtaacctcgcacatgggagaaggcagtacattctcatttacctgccgagtgaagctagctctgccgccgcctagctttgcggaccagcttgccccccaccggggtcaacgcgttctgttcttcgaccacggtcttgcgcgcagcttcccaatagctacggtactcattgagctcggaatagaaccagtcattgtgacagaggagcagttagaatgcggccagttcaaaagtgattgggtctgcactttcgacgcaatcctcatcgaaaacttggagatcgccgcaaagctccgagcctgcccggacctccaacctattccactagtcattacagctcatactgtatccctaacgctcagagctgccggtgaactcggcatagcatcctacatcacagtgccctgccgacccattgatctatggaatggcattcttcctgccctcggcaaccgcccaacccggaccccatcaggctacacacggtcgttatcaattcttttagcggaggataatgacgtgaaccaaaaggttgccgtccgaattcttgagaaattcaatcacgaggtaacagtcgtggaaaatggcctccaagctgtgcaagaggtcaaacaccaccgctacgatgtggttctcatggacgtccagatgcccgttatgggtgggttcgaggccacagggaatattagacactacgagaagctcaatgggcttcctcgtacgccgattattgctctcactgcacatgctatgcttggggatcgagataagtgcatacaggccggtatggacgattatttgtctaagccattggactctagtcgcatggtgcagactattctgaagtgctcagctatgaatcttgccccactgcctgttattgagggctaaaggccactggtatatgggttcactgcctaattgactccgcctcttatttcccccttctccaaccctctttttaactgcctataagccttttatggctgcccagtcgagtctatttcctccgaatgagctcggagcctcatttcttcccaacctccaagaggactaatgtcctaacctcagggaattcccctcctcattctcgcaatctgtacacatatcgattgcttatgcgccccaacattttgcggtggaagcgcagaccttttgaacttctattcttttgaaataccccatcgtgtcggatactctgttaacggttttctttcaaggtgatcaaattctgtctctgttcatggtgtttggttgacacgcgagatgaatacatttaaatcatgtctaatgtctaccgtggtatgccctgtctgttatcttcgcccttatttatgcatctccttcagtacacgaactcatatatgttgcgaatttagaaacaaaacattccgaagcctatttgtctctcttgttgctatggtcagaaatcaaccggtacgttgctatactatgcgtatgcgcaagatataaaagggtatcaaataggcgccgaaaacacaaaatgatacaaagaacatacagactaaacctccccggggcgtctccgatcaaatccagaatttatctcatacttccccttcttgtttcccttccccgcagaaattcgatccccctgccaccgccgccagatatcctcatcacgctgcatattccgcctcccataacccagatactcatcaaagcgtttcctaagcccagagtcctcaggcacgacgtgaataggtattttacctgtagcagaaccccataagaatgatttaatcggatgcaggatgaagtccttcgataggcccgcgccgatcttgtgcattttggatacgatatcgcgtagcgtttcgctgaaggctatgaagagggacaggaagattattgcaaaggatgccggggctggaaaatgtcagttggtatagtcatatagtgtttgagacgaaacggacctgctatttcgaacatttgtcctagggttgggtttgcctgttccccgctccattctcgggcattgattccaaacaaggaggtaaagaaagatagagggaggaagcttgaattgtcagaactgattcttggattttggagagtatgtagacttacacaacactgaatatggtgaagaccatcactgctcgcgattgcgtttgggcaacttcagcttgccaccgagtcatcttggcttcgtcgacatttgcctgtttctgcttgaggtcaaggagcgtttccacctggctggttagtaggaaaaaaaaagacgtgaacggggaacgtgggaactcactgctttctgcgctagatggctgttttctttcatctcattgatttgtgaacgatattcgtcgattcgctcttgtgctgtatcgaggaatgatttaccgcaccctttgttaccgaagtatttcaccatatttttgataacggtgtcttgttgatcgagcagctttaggatggtggatagctcgtcttcgatgtcacgcagctcaagcagaacggatagatcttctcgatttcgacgagcaacctgcaattctttgtaatcttgctgcgcggctgtcatgatcttgccgtctgaggtgcggtcatgatccgctgggcggttggtgaagcctctatttcgaaagcgcttgaaagacttcgtcactgattcggtctgattttgttaatatgatctacccaaggagttgtcacgaagggatgaacctaccaatatgctgattgactcctcgaagattcgcaatacctgcagatcatgattgagagtcttatccaggagaacagtgacagcatgcagcatgataagagcagccaagtcaccggcggtctcaaaccgacgcgagagatccccattcaactcattataaatgctgcgatgcaagttcgactgttcaaaaagcttcccctcagaggtcgcagcctcttgattcggaaagaaagtaacaacagtcttttgatccacaatccaaagccagagctgatcaaccatcaggacattgccatctagaaactcgccaatatcctcgttatcgggatcatcctgtgcagactgcagatactcttttaattgctcatcaatgcgcgccggtctgcgagtgcgcttccaaagcatctggtcgtcgtcacgagcgatagtcgagcgtagattgggatacccatattgatccaatgtgcggcggaaatgtactggaggttcgcagccgagatagctccagatgagttgggcttccaggcttgcctttgagatccggcttgggacgggcttggatcggccctggttgagtcgatcttcgaccaccttacgccgttggattaggttgcgatatgtatcccagtggagctggagtgagttagtacagtgcggaagaagggtactgggtcaattgaaagtactaacgtagggaacctgacaaatatatatgttagtgctgatattcacatcgaggacttgaaacatacatatagagcgagctgaggatccttggaaggattagaaggacgttctgaaatatccatttgtctggagtgaatgcatgcgggcttgacgaaacgtgcatggggctcgaggtgacgagctctattaaaccggttgtaccaattttcgtcattgataaatttccgaacactgcaaaagatagttagcaatgtgcagaaccgtggagttagttcatatgccctacaaattaggctcttgcctatcctcacatgctcggcgaatgacttgggatacccagccagtatgcgtatatggcacatgaatccacatcagtttctccgtatcagcctcaggtcgatcgaagcgtggaactgctcgaggtatatccggtttgtcggcattctcgttgatgtgatcacgaatggactcgggtactgccaggaaagaggattgcactggttgtgatgcagaataggtcctgttatctattagcttacatttgttggttttcggcaagcctcagtggtttacttacgaatgtggctgttcaatatttgtccgggagctgtcagaagcacttcgactgtgggattgcttaggtcgaattaattccaccagcttggtgattgagctctttcgttttagttcctgtggcggatatgggctttcattgggtgcgtcgctcgagtagccctccatgtctgcttcggtgatgtggatattcggagagggatcggatggatcttcaaagattggcctgtagggtataggggcttgcaggaaccttgatttctcatcatgatggctttgaggatggtgtggatcggagccaggagaaacgtaggatgaaccgggtctagatctaccataactgcccattggtgaatggtccaagccactgggtcggaatcgaactagtctctcccgaagacaagctgacggaccccgagagatgtactctctcagggacactttggttgaccacagcttgagcggactttcgtcactgacacccagtgcagtatcctcgaagaagccgttaatttgaaccttgacttgctcttccacgcgtaacggaatatcctcgcgctgggaaatttcaacagccgtggccacagcattagcaagctcatcgaggaatcgatctcgtgtagactcctggccatggaaagttgccgtccccgcatggtccgttgccatgggcacttctttttcatgctcaatatccaacaaacccgaccgaatcgaagtaatgggcacatgaaactccattatgttatgagtctcggtgtcgatcacctgcatagttgaatccacagtttcgagaaaagaccagaccctcatgtcagccgaaagggttttgaactggttcgacagatgccataggtgctcttgacggggacgcaactgcatcctgagcgctgccggggtctcacaatccagatgcaggagtcgacgtatactagccgcgtattcatcggcagagagataggtcgagccttgatggggagttgcaaagaaggcgataccatgacagttgattaaggtcgactggctcgcctctcgtgatgccatggccagagctgctttgacgacgagaccaccggtgctgtggcaaataaaaaaaatgggacgtcgagttgactagggaaatgtttattaaattactcttggatatgaaaagacgatgacatgtgactaacctcatgtgtccactcactatggagttggttcaacagtcgttgacccaaggtatcgattttgtcgtcacgtaggtctccatagttatatagtaggactcgtgctcgaggcacatgctgtagtagctcttcatcaagccaggataatttcgcgccaggcgctatccacgtctctctatgatgggcgccgacgggcgggacagcgacaatactgagggatgagttattatatgatggtatgataagatggaataacttactcgacatcagtatcgtcatggagagaaacaggctcaaaccacgagcgcgtctggtcgttcacgggtggccgcgaaggcatcttgtcgagtccggttgaatatagcctcagtatacaggacgaaaacaaagctgggggaaatcgggatcaagtcagaggcaacctggcgagtcttaaatcccacaaatcagaacacttgagcctcttcgttggggtccggacgatcacgccccgacacgctagtttgcccgctgacagtcgtctccagggctgtgtcagtcaaaatgatatcgctggggctatgttatattattatatatccaaagagagagacttcaattatgtttatacagagaaaacaccccagattccaaattccaaaattccacatgctaatgcaccactctataacggctcatgtatcatcagaaacgcccataacaaaagggaaagtggagagagacagcgcatatgcattataattgtacagggattatgcgtcagagtgtcgcagttcgttgacctctcgggccatgcgctttccaagctcataggttgagatcatgatggcgcaggccggggcaacttttagacatcgcgccgtccaaccgcggaataggccggcggtgccttcttcacggaagatgtgcataaggaattttggtaaggatagttgctctggcactagtgtgccgggtgatgccgtatgaggggcggcgccagtatgaggaacatcgtccatatgtcggaaaacttgctgtcgcgtcttaccaacatcgaacggcgtagtaacaagtgctgctacggatcctgaaatgcccccggaaatgaagctatcaaggaaagcttggagacttgactcttcaggctcgtgatcagaaccggaaagaggggccttctgacgcgccgcgatcagaaccttctttacctcctcgtatccccaccagtagagcccagagaaaggaacatcgcgccacatggtaagagtgaaccctcgccagagagagctatatcccttcttctgcgtcatatggtataaatcctccacagtatttttgaagtggtccgcacccgttcccggagttgcctggagacgtgtccggaacatctccagcggactggtcgctgccgccgctgcgacacgagccaaggaccccgctatcaagggcgcataaccttcagacacccgctgtttgatgggactccgttcatccgtgcgcagccagtcatagccagcaaagtagatgacattggcggggattcccatcattaaggtcgggctcaaccctcgccacagtgtcaaagttccttcattgcgcgcgatcttccgtagtccgtctatagtcgatgtgaatgttcgccgctgcgattcttcgaccgcgcaatccatcgccggatgtggatttgttccgaccgcggtcgcctgcggccctagcatgcacatctgggcatcgtttccgacccagaagacttcgcgacagcaggaggtgataccgagatttggaggaaagtttttcaaggtttgggtggtgtgggaggtaaagcgtgaagcgttatggacctgagattgtgattgtaaacggactcggacgacatccaagggtgtcactggagctgttagtgctggattccaaggaccacgagctcttccgactaacctagaagcccggtcaagacattgccggcggtcgcagacaccatccgctgcccgggagtaatgttatctgttggaacaggggtcttgggcgctggaggagagcctgtcccggatgtagtggccattgtggaatcttcaaactgcgcggcccatgacgtctctagagaagctgttgagtctgtgccgaactgattgccagtaccgtggcctgaagcaagttccacgtgtggcattcaatcaattcgatggggaaacagtccagagttctttgagcttgtgttggaagaaaaatgatgcgtcaccgggaagaggaaccttggaagtttttcggggtctcgcgggtggcggtgggcggagataagcgttgggggagatttcggtgatttggagagatttggggggacctggaggggctagagggacgtgttttttaacgatttctgatcttgtttggcttcaatgagtttgattctgtgacaacttggtttggctgtttcttttagacctccttcatacggcttatcaatctgatctgatctccgaggtcggacatgaggcgaaacaggctatttcggctcgaccaaagggaagatcaatagtggaccttatgtagtggggtttctatagattctgaagagttgaagtatccatatttcctgggttaataggtgtttacgtatgttgggtagaaattgagtcggtgcatcgcctataacatgtatactagtagcatagaagtgaaacctcaggatatatgtggctagcattctatagaatatatcccttgctaacaagtggcattggatccaacaccccctttcgctcccattggcattcgaacgtgtactcataatttgagccattcatgttccagaagctctgcagccgactttcgatgccgggtcaattgtaggcattatgtcgaaggaagtcgatgagaatgggaatttcagtcaggcatcctcgtcgtgtttcgagccggtagattgaagacgcgcgcgcaagacaaccgaagctccagctcgagtagtatattggtgggttttagatctccatggaggaaatctaacccgagtaaaagctgtcgtgctatagttcttaccgcactatcccatcttcatattttgcgcatcgaacacaaggcatacatgctgtccatttggacctctgtgtttgaattgaccctgaagacgtagcataaagtgtcggcctccattttccccagcaatatcggataacctctcgagaatttctcgcttgaagctatcgtgcgagctagccaaccaaacggtagaacactacctatagcctagtttcctcatcactttgtatgcactgaaagtgtcctaagcgaaacgggctggaaacctccggtagaataaagtctggctcttctgttgtctggtgtgaatcaagagacctcgatgtttgagaaacaggttcaaagatcttgcgagccaagaccgagaatttactcgactcaaagccattttgaaagtagtcatcatcttgagatctcatctgcagtatttgtagcatggatattgtggatcgtggatgcctttaagttcccaaacgcaacaatcacatgtcgctatacagcatagtcagctttacttctttctcggtagtccatttggtaaggcagacataggtcctgactccaaattaagaacctagcttggcaatgtagccacacacgttttcattggctctgaaaagtgaagtagggcaaaatggctagggagtatacttgacggaggattgatgcgcaagttcattccaatgctttatattatgcaatatctcgtgttaaatacaataaacagtgacttgaagaggactcctatgtgaggcttgaaaaagccggggatgccaagcctcccgagatcggcgtgtgtcatcatcgcctggagatatcaatggatgcctggatgagaacgccctccaatcactacctcgctatggacgacaacgacgagcttgagtcgttccgccaacagtggcgcgaggaggtcactcgtcgatcaaaacccaaagctgcccctgctgctcctgcaactccggctccgactgccccgcctccgactcgtcttccgcccacacgccatgaggcctctgaccgcaaagagattgaggaggagggtcccccactggcttcatttgaccccgatgagcttgcgcatcaagtcggggaactgagtgtggaaccacccgaagatgatttctcacgccgagatgtcgcagagccaacgtctgcactggaacactttgaacgagcggtcgagaaggaggccgaaggcaacttgggagacagtctttcgcattaccgaaaggcatatagggtgggttttgactgctagaaatggcacttatgacgcaaatactcatttcaattcagctagattccgctgtcgataagtcctaccggaataagcactatgcccatgtatggaagaatccgaatcagcccgcgcctactacccctaccgccgtgactcaacagcccgcagatgtaccaatcctcccgacacctgaacttatcgcgtcatttgcacacctgccaatttcacagctggatcccatcgtcgaaaacacaccgccgcctccctgcccaatcgccactgtgccgtcggaagtgctagtggagattctgcgacatgtggcgatggacgacccatcagcctttggccggatggcactagtctgtaagcggatggcttaccatttcgcccatgagcagcatatctggagacggatctgtcaaggtcgggaatttggcttccagggcatgcattatgactttgcatgcgacctgcatggggaaccaatctatacccttgcgccgcgatacactccatttcccaagggcgggcctgtggaaatcccccagccgctgtcttcgtggagccaagtgttccagacccttcctcggattcgcttcacaggcatctacattagcacggtcaactatactcggcctggtgctgcatctgcgtacacgaatctgtcgtggaacagccccatccacatcgtgacttattaccgctatctgcggttctatccagatggctcggtcatctcgctgcttacttcaacggagccagtcgatgtggtccctcatattagcaaagagaatgtgatggcagcacgcaccccagcacaccgaaagaatcaacggcgtccctccgatgcgggtcatactctttctggagctactgatgcattaccacccgtcgccctgaatacgttgaagcatggccttcggggccggtggcatttggcgtcgcccgttgacacatcagaaacttccgacacgcccacccaagcctggaagcccgactcaacttctgatcagaaatcgctcctttccgacgagcgggatctcattattgaaacagagggtgtagaccccaagtatgtttatacgatgcatctatcgttacgttcctcgaccgtaccgaaatctgctcaagtcgggccagcttctcccaacccatcgaagaacaccaagctagcttggaagggcttctggagttataacagactgacagacgactggggcgaattcggtcttcgcaatgaccgagcgttcgtgttccggcgcgtacgcggctggggcttggactgatatgattgatgacttatacacgaaagatttgttacatacatggaaaatgagatatacatgaatttgaatatattgaatatcgtttcggggtttgtatcatccctgaagctattgagagtcacaagattaaaaatgaaatacagaacgtttcaccaagaaaaatgtgataagatattttccctaattgaaaccgcaagggatctcgagaatcgccagaaatatatcaacgcaggttgctcagaaactggcggaatcgtcggggaatcgatggacgtggcccaggagaagatgttcgttccgcgactacatggtaagcctgcaaggcattggtcttgaatgcatgcgtaccaccccacaagaacaggcgaaagatacgataattatgttctccccaagccgcgataagatcgtctttggacgaatctagacgctttgcccattccaacattgtgagctcgtagtcccgagtctcattagtaacatccagcaccgcaaacccgtggtataagagctcagcaaggacgtcctgaagagtcatgaaagtgtgcgtgccacgccaaatatagtctctggtaaaagagctaacagcaaacttctcaacagctgccgaaccgtcaaggtacatacggccaccgggcttcaacacatcccacatcctgcgtgcaaatcgttgataattagggatatgctcaatcacccctaatatcacaacatggtcgtatggctcctctgggttatgatcaagaaagtcttgtacgaagacttgaccagggacattcttctcctctataacacgctgcacataacgagcgctattgggcgcgatcgtcaacgtcgtgacatggactcctcgagcaccacaatactgagtcacaccaccccacccaccaccaatatcaagaattctcatacctggtttgaggccgagagaagcaaacatggtctccattttgtgctcagaggcttcttcgagcgtctcgtccggtcgctggaacaaaccgtgggtatagaaccggaaacgcttgtcaaggaaggagaggaagaacccgtcatcgagaccgtagtgatcaccgatcgccttggcgttcatcttggtcgcggtccggagaaaatcatacacgaactggaatttctgtcgcagaggcactttctcctgtagattttggcgggcgttgaacaaggcgcccaagtcaccctcaacctcgatatcaccagatagataagctcggccaacgcccatttctgtcattggtgtgcgcagcgcactctccgagcggaaaatcactcgataaactggctcgccgatgccgactggtatcactgcgccgttgggcagctgtatttcgccgggcgtctttagtcctgctaggagtgtggccacacccgtgcggggtagactattgcgagatgcttttgacattggagattgaagatagtgttaagttttggtaattcttctgatggtgatgtatagccacggggagatgaagtcaaatacgtccaggactagatttgtaatgccaacgacgaccataggagtatttgaaatagaagatcaggcagactggatatgtccatttagttgcaagagcacgcaagacaacctgcattagcggcagacagaatcagcctattggttcaatctcaatatctgacgtgtgatagtatctgtgtcaacgtgcagcttatactccgtgagaatgccgaagaggggtattatggatctattcacaataaaaaggaaatatacacatgggagattaaactaggattctatatctcctcatcttcatcatccatcatccacaactacaaccatccacacacccacttgaccattactcgcaaggagaggcgtgcaatggacccatcgattgcgaccgtcgggattggaacgcgttgtccacttgatacgcgcagtcacactgcgcccaactttcatagtttgtagtaggtcatctttaactgccgaggaactgccaatgcgggatagaaatggtgattgcagcatgcctgggatctggagggcaggcgacgtgaacagaatccggagggaagggtatggtcgaacgaggagatactgtatcatgtattatgttagtctgtgccatgaagtttgcaaataaacatctcatctcttacgttctcatacacgcccgcaaatgacatccggaaaaggggcgatttcatctcacgtagacggacggcttcagtctctctttctaaggatgcgtcgggctggaaccatgatcgcgggtgatgcggatatgcgaggctttgcataggttggaacagatttccaccatactgttgaacagcggagagttcccgcggactgaacagttcagtcagctcacggaactcatccttctcttctgcttctggtggctccgcaatgctctcttcgtcgggatcgcggtatttgttttgtagttccatcaaggattccatcgaggctccctccattgcaagtcccgagacatcgatctgtgcgccgatgaagtatttgacacggccgtggctgtcgcatagaggtgcgcactggagcaggttcatgaatggagagccgtcacgacgactggttatgttagttatctgggtgactatattggctaaaggctgagttatagagcatactagttgagaaacatttctgaatgatgccggcctgcgttaatagcttcgcgaagtcgacgaacactgttcgcatttgtcttcgggccttgtaaaaagcgacaatttcgaccaagcacgtaatccatgccgtactgagttgttctgtggaactctgattttgttagttcgattcggaaaacgagctggggaaagaaaaacataccttctgatgcgaaaataattggattgtcaggtcgcgatgggtctgtcaggcaaaatacttctgccagtgcattcgaagtcccgcgaaacttcattggcaaggttcctcggactcgctcctccacgatcttgcttgtgatgttgatacatctggctgtgatgaatgcagggagctcctcggcagtgagagccaacagcccgtctacaacacgccgctccaaaacacggttcaccgtcaccccggcggcttccccgtccgtccggactgctgggggaggcacatcaatagagaggcggacgagcgcattagcatattcaattgccttaagcgctttggaggcgttgaggtagtatgtgagggtagaaatggagcgcggccgctcttcgagaataaagtcacgaaatcgagctagataccgggggttatttaggattgtgagcatatgttcggacgaaaacatgatgtcggcaattctttccagcttgtagagtggtagatcgccgccatcgtagggcgcaatgagatcgtatgagccggtctcttcgctgacggggttaaactctggtgctccctcattcggattgatttgctgtagaagaggaagctcattggccgtcgcatgtcgacgcagattcttgatagaaggatttggtgtgggatacgcttccatctcttcctcgtgaattgcatttagactttccaacctcggtggatgggggaagttgtccaataattgatcagtcctgtcttgtcagcgcattcagtgaaacctaccaccttgagttcaacgtactgtgacaatcgaccggactcgctgacccattcgtggtattcgtcttgaatagtctcagtgaatgagcgcaatgactctgcatcgggggttcttagcccatcatggagcccctggaggccacggagatctgtatgcgacattgtttgagtaaagaaaatacgagatccggctgtataacgtcctggaaacagaccttttctttaatagtaggaaatccttccctaggcactggcgcccctccagaatgatacatcatttcatgcactctccagggtttcattacaaggaatgcaacggacacgatggaaagagtctgccaaagtacagagataatatgggaggtcataatggcaaaaagtagatcgatcgatggtctactgaactccacgagatcggagtcgatcgttgatcgatgatgccacagtgcagcggatgacctttggggatcagctattgaactttgggttgaaaacactgactggaattgcctggaattgcgatacatccattggattgttcgcaaataggctacggttggctagttcctattcgttgcttggataattgtttgacagaggatcttccaattcccccttttccctcgaaggctgcggcaggttttggatggtttgtttaccgccttggtctcgtctgtatactcagctcccttttcttcttgcagtcaaaataccagtccctcagagacatcaccagtgggaaagacactacaacggtgatgtctcggcgtggaagctttgatttcacggttcctttagattgacgcggcgaacagagaattagaatagtctgccttattatattcttttcgtatgctttatataggttcatgacaagacgtatgccgtatgttcgagtttcgatatatgaagagaagagaccgagaataacaaatcactgcaacaccataacccacaaatataaacaaaaagtgaatgaaaccagaaattactcgttctgtaaatgacgatgaagtagtatgcagcccatatatagcaagcgacgccccaaatgacattgccatctacccactccgatggatgcatcatgtgctctgcaagtatgaaagtgttcacacctcaccccaggtgccgagcccagctccaacaccaatgacactattgctttcgctgccaccaatatcccaatagttccgactagaacttgtcatcgtccgccggctggaaatagccgagagcttggcgctctggctggcacaactggagccaggccgccgatgcggtcgtacgattggcgaggagacacccgctgtgtttgatacaccggagaattgtgatgcgcgacgggtctggggttgtgatcgggagtaggctcgcgccacgagtgggtgatgttgccggatgatggcggctcggcgggatgcgtcttgcgcgcggcgcggtggggttggtgtgtgcgcttcattgggcatgtaacctcggcggctgaagcggttgcggaggtagcggaataccatcattacatcgagtccgctttcccaatactcggactcgtgttgaagctttatcgattcggagagttggtcagatcgctttggatcgtcatcttcgattccccattgtgcttcgtgctcccgattcgagtctcgaagtgtgggcgtgaagtgcggtgatagcatggaatcgccagttgtatcagcaacggttgatgcggtcgactcggcaggtttctgagaaattccgctttctgctaggcggttgagagacatccccgcatattcggcggatatgtctttagtcatttgataataggttgtaaatgccccgggatgttcacaaatttgatgaacaaggattcccagctcatgggcgatcgtttgaagcacctttgtctgccagagtggcgaatagctgaattctggctctggttcacgagctagtaccgtttccatgtctagtggatcttcctgtgggagcggttgcgcgtccagcggcaacgactcaccaaagatcacggagagcaaggaatcatcaatcccgatgaggtcacggatcaccgtgcgtgtgatgcggcgccagaaagactcttcatcctccgagacatctttcgacagtgatatatcccgtgatagcacctcggatacacgactttgtgggctaggatcaaccgaatgacgcaggctcgatcggctggtcagactagtccgcctctgtcgggtttctcgttcgatttcctgcaatagagcccggctctggtccatgcgccattcttcgattcgctgccaccgttctcgctcgacatttgtctcgccctcatcaacagtatccagatatctctgcacactcgagtgactgtgatgttgaatatggccgtacgagggccgttgggggttgtattgctcatgctgccacagctgatcctggactgcctgactcgaggcctggaaactgcctaacccgtcatgggccgggagcatggcaggcggcccctgatcgaaccgtgttggggaaaccggggctaggtctggtattcgaaaagcgtgcagtccatcgtctaggctgtctagttcggttccatcttcgtccagttgatcgtcgagggcattctcgtcatcggcttctccctcggcgccgattccagagcgggttgcagcaaaggagccgaagtcactcagccgagaagcacctacagtacgcgtacgatcggttgaagtggtgtgtgtccgagcggtcggggagaataggacccattgtgcggtgtcgtcatcgcgctgttccgacaaggaggaggggatgtcgagagtaggtggcggaggggttgaataggaagttctgcggcgggggacgtgtgttgggacctggaaggccatcttgttgatttgatcgcagccaaagtagatagatagtacgataagcgggttcgatggtggatccagagagagggggagttaaggctgttcaagcggggattataagcattaaagtatatggaggagattggtataaataagaggaactaagaaaggaggagtagaaagaatccaagtccaaaaacaagaaaggacaagcttggaagagtgtcctggtgatgtgagggagggagattagctgataagcgggaagatgggcccgcgggagcccgagtcgccctgggatcggccagtgatctaccaatgatgcaaccggtatcggaatggtgagaccagttgtgtatccgttctgtatcgcgcgtagaagaggtcataagataatgtagagacatgttgagtatattacaatattgggtacggagaagtgaccctagtactatggcttgaagtatggcaggtgcctcaaggagtataagcaggcagaataagatcactggtcaactccctttagaatcactttctttagaatcactttctttagaatcactttctttagaatcaacttcctttacggagtagattaggaagtatgttataaagtaaagtgttgttgtcgccacttcagatgccggataatcacatgatctgttgttatccattgggtcacatgtctttcagaggtatagaactaaactattgcgaacatcggcgtttttgaccttcataacatcggtccccgattccttggccacttggcagaagatggtcgtgtgattggattcttgatagaacgtatcaagaacgcccggcatcaaacaccgcgatacaaactgatgcagctttctcattcgtgattcaacggctattttacaaattccctagcggatccatcacgtccaggtgggggagatcttcttcaaataatttgttgcctatctttagggtgttgatatgtagttagttagttaactagttaactaactagttacggagtagttacccccttagataatcgtacccccgaaaatttaggcgcaccttcctaatcgggtatagatattgtcgctctccttcttaagttaaacttcccagtagtaagacagaaggtacctacaatttgtatgtaaactcctagcaaaaataagtcactcctaccatatcctcaggtatcaactacttcactgcttcatccttgcccttgctgatgggagcttcattctcttgttcgcaatgtctaccacgatttccatcaggcacttgcgaccgcacctgagtagggggtttgcagatttataccgaaaggacagatggagagaagtgaaagatgcgaatttgaatggtatcatcgctcacggggtatatattagactactataatatagcatctcgagccgacgatcaatccttcccagctaaggcctctccgacccaatccatctgcacagcactgacaccacgcgcgtaactacggttggtgaatacgaattcgttgtacatgattgcctcgagctttttgccgtaaagcacactagacgggtgaatggcgacggtttggtttccaacgatcgtacgataactgccatcgggcacgagacgagccgtattggtcgcgaatccagctaggaagctctggagaatgaggatgggcgaggggtcgtgtagtgaggtattgttcagggcttcgttggtgagcagcttggcttgtcggcactgggtgcggagttgcttgcggacgtcctgttgtggcctcgttagtttcatatgactgctgtccaatcatgtactactcaccatgactgattgcatcgcccggtgggataccaggtgtcgctctgcccatgctttacggtcggcgtgttcagcggcatacacacgaacggtcgtcagcattgtgaggtggtcaccctcgcgccggtatagatcacgacgggctgcttctgctgcctccttcttttcttccgaggtggtgttcaaaaagatgttctccacactgagacatgaaataatatcaataacatctagcaaacattcaggcccattttcgccagctgccaacagtacacgtcctagagttggagtcaatggtagcttggcaatatgtaggccgacggcgctgatctttccatcgtcttcaagcgcattaatgttcaatagctgcagaagagctttctcgagtgcttcgcgtggtggccgcgtcaggaatgggaacccaacaatgtcatcaacgccacgagccttcatgttcagtagggcttggctcagatcacagcgcagaatctcgggcgtgtttgtctcatccaaggccagatagtctttctctgtgtacaagcggaaacattgaccaggagcctcacgaccagctcgacccttccgctggattgcagctgatttagagataggctttactaggagcgagtcaagaccaagacgagttcggaactgcttgactttggccttgccgcagtcaatcacgtgccgtacaccagacacagtgacagaagtctcagcaatattggtagatagcacaactttgcgcgttcgtggtggagcaggggcaaagacccgttgttgagcagcctgtggcagcgcggcgaacagaggtagaaccaggatcttaggaagtgatgggtccatacccatggcgtactcattcactaggtgttccaatgcctcgacggtttcctggccagtcaggaagacaaggatatcacccggcattggttccttctgatgaatctgaaagatgattttcagcgctgcatccacgaagtcatgtactggcgcgggggagtagatagttttgaccgcaaattgtcgacccttaatacggcagacagagatatcctttggactcgaagtatccattttgtcggcttcagcctcgactccctcaatagccttctgttctggctccggtcttttgaatccttgttggaagaagtctgtcaaactctccatatcagccgtagcactcatgacaaccaccttcagcggcacaccacctcggccctccttctttccagatacaagattacgcaggaatccaagtgtcagatccacgttgatgcctcgttcgtggacctcatcaaccacaatagcgctgtacttagtcaagttgggatcgtgcaacatctcctggagcagcattccctcagtcaagaacttgatccgtgtactaggcgatgtcgacgtatcaaatcgcacagagtagccgactttgctggcaggcgagtgcgatccaagcggtgtacccatctcctcggctacacggcgggccagcgaaatggcagcgactcgtctcggctgcgtgatagcgatgcatcctccgaccattttcttttccgtcttcccatcccgcgtgatttgcgtaggtacgggccgacaccagaattcgtctaccaagaactgcgggatctgcgtactctttccgctacccgtctcaccgaccaacagcatcacatcttgttcccgtagcagatcgcgaatcaaatcagcattttcgaatacggggagctttcgccgtgtctcgaggagggctttggccttttctcttaaaggagtgaagttggttttggtatcggtgaaaggtttggacttcgacttcgggtggaattttgttgttgatgggccgtttgtttgagatgctgcatgcggccatttttttggaacagagactgatctttctacctccttggcagatgcagggatttccctcggttcatcttgatcggcggggttggaggcttcgggctcatcgagcttgcgcttcttgtttctcttcttctttcgctcgggtccttctgtgggttgagatgaaagggtttgctttaaaatcctctcatcatccgactccgcgaacacggtgcgaaccttttctggcattttgagttgagacgcgaaagaatgttcaccaggaagctcgaatctgaaatttttgccttatcgataagataagctgataaacattctccttatcaacatcatcagccctagttaactagcggcccttgttattcatactccgatcattttactttcgtggcatcgtgacacggcacgaatgagctgttttaaatatatactataagcaaagaaagtaaattatgtggtcattcccttgttcgagtcttttgactacaatatatgtaaagtagaattaggttggcgaaattaaattgacgcttgatcagtaagacaaaataccgaaaaatctggcgtaaatatcctcctttagtacctttatttgctacctttcgctctttgcttacaaccttggaataattaacactatatgactttgattttggtatccttgaacagagtgctagttcatgatcgtgatttatgtaaagctctgtgatggaaaatcgtgcagcgtattttaccacacgactataacaaaaaccaaggtccctgtttaaggcctagaggggccatatcccattctgacactctggcctatctaaaatttggctctgctggaggaagagaaaatccccgtggtctattctattcacgccgagtcgcttctatggtcttctccgcatcaacccgcccttggactcaagatctttttttggttgtccctgcttgatactcttccactctagagtagtcgcacccagtagtgtcagacacgagagaatcaaaccgacctgaaacaccttcttgagcgcttcgttgtaggagtagagaaccacgtcgtgcagatgtgccggcattgaattcagcagctccgtgacaccacccgaggtgacaagacgggggttgaaccccggcagcccggaaagtttcttcaccagctgattggccagaatattttccccgacggagacaaagatagctgccccgatcaattgaccgaacagcatcagtgctaagccagagggcacgtcgggctttggaagaacagtttgtgcggcgagatttgggacttggaaacacaagcccagaccgattccgtagacgatctgataaccgatccattttccttccccggtatctacctggaaagtggtgaggagaccggctccgacggacatgatgcaggatccgataatggccaatggagtgtagtatccaatcttggagtttatgattccaccactgattgagccaacaaccattgatatcatcgtcggtagcagacggatgccggattccacagcagaactgcccttgatggattggaaccagattggaaggaagtacactgtgattgaagtcagtaacatgaaataatgtttgatagtgcggtttcattaccaaagatatagattcctgatccgacgcagagtgtctgccagaagcctgaaatgatgctgcgctgcgaaaagatgcgaactggaagcgtagctgtcttcggaagaaagacctggacgacaacaaaagaaataagtaagacgctcatgacaaccaggcaagccaccacgcggctactgccccactgcaaaatgtcagctatagttggaaataatggtgtacgggacttacagcatacgtttggcctccccattgaagtgccaatatgagacagaccacgccagatactagaaatgtagtgccgaaaaaatccagttgcagctttttttccgtccaggagacctttgttgtatcctgcttggggacctggaggcagaaggcaatgaagacgatggcagcaccaccaattggcagattaatataaaagcaccatctccatgtcaccttcgacgtaaagacgccgccaatcaagggacccacgacagaggcgatgccgaaaagggcgccgaacagtccttgaatttgcggacgcttctcaagaggaacggcatggatgatgcacattatctaagtgaatcttttgtcagcaattggcacaaagggtaggggctagaatcaacttacagttccagccagtattccagcagcaccgactccacagattgctcttccaattatgaaggcaactgaattcggcgccgctccacaaatagcagaggcaaactcaaacactagaatactgacaaggaagacaattctgacagaaaagagcttgtacagcttgccgaacaggagttgaaatgcgcagcatgtcaacaagtacgagcttccgtaccagccaacgtggtcgaaggaattgaattcatcggtgattttgggtatggcctatcaattgcgtatctctcagcgctagaattagactgaattcaatgtatcatgatcataccgttgagataattgttctgtcaagcgcaactaggaacatggcgacaaaggccgagacgatgagacagacaaccctaagggtggactggttctcaggtgggcccgaaggacctggagagcctccagttttgcctggtgcgacatctttgactggtgcatcataatgttcatgcaacaactctggagcacccattgtagccgttttggtgctttcagatgtagaagtgcgtagtggagacataccactaagcaagatgcgaccgatcggttattgatgcgcgagagataatcttgtagaccataataaataccaaggaaagctcccatatttaaaggggcccaagggacaaaacatggtcggcgatttcgcattttgcagaggatcaacaagatggtcgggggttagtaagtgcgacggttagcaagtggcgttgcttcggcacttataaaacccgacttccccttcccggtgtttctctcagtcaacccaggcttcggggtctaggctctattatttgacatctctgacgcaacaggataatctcaggtcatggcgacgccaatctccccatccgagcacacagccgccgtcaaggcccggcgcgtgctggcctgcgtgctgtgtcagcaacgcaagatcaagtgtgatcgtacattcccttgcgccaactgtgtacgtgccagcgagcagtgtgaacagtcaacccgccagcgacgccggaggtttcctgagagagagttgctagcgcgcctgcgacgctatgagagcctgcttcgccagcataacatcgagtttgatcctctccatacgcctactgcaaaccgtaggtctcccagcgaggatggccaagatggacttccagagggtgcccactcagaaggtgctcttcgtgatacggattctcgcccgtcgagagaaaagaaagcagtcaagcctaaatccttgtatgaaactcggtgttattcttctcgtgaaacatacttctggatgactaatcagtagtaggaatctctggcatgctatgaatcaaaaggtatgatcgatcgcctctgtgagtaattgtgggctcactgacaattacgaaagactattgatcccaaggatgatgatggaaacgacggtgacgacgacgatgaaaacgacaccgggttcctccacgacaatgttgatatacgccacgccgtaatcaagaccgcatgaaaccatatgttccaaggcaaaagcaacgaccacttgttcttcggttcaccggcagggaacatcgatgacctttctgcttcgcatccgacccaggtacagatcttcaggctttggcagatctacttggataacgtgaaccctcttcttaaagtaacgcacacacctacccttcaaacacgtatcatcgatgctgctagcgacatcgccaatgtcgatcccatattggaagcattgatgttcagtatctactgtgtctccattctgagtctcacagaagatcagtgtattaccttgttcggatctcccaaaaaggatcttttgaaagcctatcagtctgcatgccagcaagcgttacggagttgttgtattttacgttccagtaaccgtgagtgcttgaccgcattgtatctgtatctagtaggtgtgtccaaactttttgtctacactcactgatttttgcaggtgtcgaccaggcctgacacggaccctgtatctctctcatcaatgcttagcgttgctataaggatcgcccagcggataggcattcataatgagtcgttatacagtaaatgttccagtctcgaggcagagatgagtcggagactgtggtggtcgctcattatctttgataatcgcatctgcgaaatgtccgattataaaaccacgtcgctagctcctacctgggactgccgtattcctctcaatgttagtgattttgagcttcagccagatattagagccccacccgcaacaagcaacagaccaacagagatgctctttgctgttgtgcgcagcgagctcgccgactttgtccgtcacagcaccttccacctcgagtttaccaatccgtttttgaacacgaccgcccgccgatctaccaccacagacgagggggagggacttctagcgctcgagaagatgatagaggagaaatacctcacattctgcaatccagagaacccactgcatttcatgacgatgtggacaatgcggggctatttggccaagaaccgcctcttgcaacactactctcgatacttggcgggctctgtgcagcagacagctacacagcggaactcaggcatctctcacgcactgcgcatgctagagtgcgataccaacctcatggcatcgtctctcaccaagggatacctgtggcttattcacttccacttccccttccccgcgtacattcatatccttcaggatctgaagaagaggcccatcgagaaacacgcagaccaggcgtgggaggtcatgagcaataactacgaggtccgcatgatggatgctaaggaggaggaccgccccttctttatcgtcttctgtcggattgtctttcaggcttgggaggcacgtgaaaaaatagcgagacagcaggagacgcccctagtgccaccgcggattgtgtcggatatccggaataaagtaatgcatatgatatcgaatttcggacaagacgcggacacaatgcagcccggtggttccctaggttccaatatgggtgacctgtcgatgcctactgagatggatttcagtgttcctggcataacatatggtgctgactggcaggttcccacgagtttgggaccgtgggggtatcctgagattcctgggccgaacttaacggacgtggatgtgaatcaatttcttttggacacgatggagtggaatgggctgcatgtacgaacggggtgagaaaaaaagaaattctcattcgagatgagaattatgcgatttttgtacctgttgagttaagaacatagtcaattgaatctaggggacctcagcttgaacgtgcctcggatagtataatgtccgagctgatagctcgggagttagcatgtccgttaagtggagctgcattcctcgctgtgattggcttgacttgagcttggatgcccagaaagccaaggttggcggcgccacggatccacccgtaccacatcgtggcaaagtcaattgtatacatgcggactccgaacccggctgcctgcaattctctataaaagacactccctatgtcttcatatccccatcagctatcagagtcatagttttacttggtacactaaaatcggtctttcaaattacaacttcaagcatgtctatccgagccctcaaccagaactccccctccttgaactttgccgccaacgcggagggacagggtccatgttgccctttcttccgtcctcacggaggcgagtatccttactccaacaaatggtatcttcagtctggcagcgatcaacccggccacccaggccatccttacttgtctccgtgggccgaaaccggcgacaaagaccaggacaatgaagccaacgacaacagctgggataccaccaaccctcgcaagccataccaatgcccagggcccgcggaagtttatcctccgcacaactttcctagcgcctctgaaggccgcaagccttgccctttcccgggctaccctcaacagccgtacacctacccagttctcttccatggtatcagtcacatgcccatcccggccctgcggagtgtcaaaagccatatccttccctctggaatgacgagaaatcccagccctatgctcgcaagccgttggggttcttgttattgaggtgccaaagacagagccggatgatgatgccgaggctaagagggttgaggttgagtaattagaggtttggtatagataaaatagtcagtattaaaaacttaggcctcatacacggatcttcctcccatgtgtagattatcaagaaaatggaaatttcgagctcaactaatccccagttgacatatatttgaatttttcacctaaggaccaacttatttgattatgaaattgttcttaataaaagctagttattagaatggtctggacagtgaagacgggaataggtcccgggaggcccgaaccttattcttctaaccaatgagaattgatattacataatgattcccatcacagacatcgagcaaaccgaaggataaaaaaatcagtcacgacgaaaatggtattacggccacatctgacgagttagaggagggaccgacaaaacggaagttaatcacaggcctgccttcaaattaaaattctacctggcttaattcgtgacgattgcggagcaaagcgaagcaattaaatcaacctcgttgttttctcctatgaatcaatgcggtgaaatatcatcggccaactttggcagaataatccaaccggcagaatgaatatagattagatggatatcgcagggtccgcctcgatagcacttgggaggcatccaaagcagccgtcaaagcattgaaacatggaatccaagccctggctgataattattatttcaagcgtattacggactggcctgcttcttggatgcatccgagtcaagcgaaatgaagattctgatatggaaaaatccagaaacatgcagataactgcccgtcaggtactctgagagctcaaagagcgaaaataactgataaattgaaagcatatatccgttttaagaccatatctagtcttataatttcaattagtatgagattacatggcgataaactcatagttgagagctacctaattaggcttagtgcccctcgatttgcttcctagacttaccgcccaaggactagtactatttatcgtaattctgccgatttcaaacacgcataatctaaaatgccaagaagccacgtgctctcgggcaatccctccgctttggcggggtttgtataccttcatttttgctatggtgtaatggtaagatagtctgtaatttccctaccaacttatctttatttctatgtatttgtcgatagggtctctcattggaaaatgtgagagccatgccaaagagtaaagcgtccgcgacacgtgatatatcaagtgcggggaagataagaataaggtttataccattttaggcctagtgaaggggctagtggcttgataagacgtcagcagctgcattgagatgtggcattggcatattggaagaggaaagtcaccgcgaaagcctgagaaattttttgcactcgaaatggtgtcccacatattgcagctccaccaggaactgtggtctcacgagtcacaatgtaatcctataaagatcatcgagagtcgctgaactgaagacctggatagacaacaacaagacagagattccttatcttgattcccccgctgacaatcttacactatgggatctatcgagatcatagaacagcagtacgatgtccttatcatcggtgccggtctttcgggtatctgcgcactacacaacttccgaaagcgctttccatcgtggcgcgttggagttctggaggcagccgacaatgttgggggaacttggtattgcaaccgctaccctggagcacgagttgacaccgaatcactttcctacgcatattcgtgggacaaagacctcttgaacgaatggacctggggggagtctttctccacccagtcagaggtgctccgttatattgaacatgtctgcgacaagcacaacctttacaaaaatatccagcttaacactcgagttaaggaagccgtttggcaggaaaagaacaatacttggctgtttcgcgacgaagtcggcacccatcaccgaacccgtttcttcgtcagctgcatgggtttcctctcaaccccgacacttcccgccattccagatattgaaatgtttcaaggaaaggcattccatacctcccggtggcccaaagactttgacatgaagcgtgatctggccaacaagcgggtgggtgtcatcggcaccggcgcaacgggaatccaaataatcacagcgatctcaaaagaaccgagcatcagatcattgaatgttttccaacgcacggcaaactggtctgcgcccctacggaacgaggtgattaggcccgagcagatggagcagcaccgcaaaaactacggtgccgttttccaactctgcgccaaaacacccagctgcttcatgcaccaagccgacccgcggaagtccctggaagtatctgcagaagagcggttggagctttgggaagatatatatgcaaagcccggttttgccaaatggctaggcacattcagcgacacatataacaaccgtgaagcaaacaaactgtactccgattttatggccagcaaaattcgagccagaatacatgatcccgaggttgctgacagcatgattcccaaagatcatggcttcggcacacgacgtgtccctctcgagagtggatactttgaggcatttaaccagcctaatgtccaccttgttgatctcaagaaaacgccaattgagagagtcacgaagaatggtattgtcacatctgatggcaaagagcataaattggatgttttgatctatgcaacgggctttgacgccattaccggtgcattcagccccattgattggacagggagaaacggtcgccctcttctcggctttagcaacaccaagcaaggcgagcaagcaatttgggttgatcaccggccccgtacatacttgggcatgacggcttgcgatatgcctaacatgttcatggtcctgggtcctcaccaaccattcggcaatgctccccggactatcgagcacgccgtggaggttatttcagatctcttacaacactgcaaagacaacagctactcctatgtagagccgacgggagaagctgtgaatgcatggacggaacacgttgttgaatgcagtaaaggtgctttgtcaaacgaaatcgacagctggatgaccggggttaatacgaatgtgaaggggaagactgttagaagtgttgcgaggtacagtgggagtgccgtggagtatcgccgaagatgcgctgagtctaaggcagctggttggaaaggtttggcatttgctcaactgtcaagttccaagctttgatatagataaatacttatcaactatcaccattgaacgtattgtttacactgccccataagcataccacaatcagaacgaatcaacctcagtcagaccccaaactagacaataaactggcagaaggagcaaagaatgtcgtcccagtaagcggcttcgagaaatcaaggatacgatcatgcaggccaggaggatcgccaataaacatacgctccatcattctttcaatcacccaaagacgacgagtatagcctatgaagtaagtcccaaactcgccagaaccaggagatccaaatggcatattatcacgaagaatatcatgctcattcccatcttcatcttcaaccgtggtgagtgtcttgtgagagcgctgacccgacttggcatcatcgagctcaatattatctattttggtgcggccgataatcctttcctgctgttccgtcgagagatctttccatccaggtagatcgtgactgtacttctgtacgacgatatagctgccacccgcggcagctgtatcttcctctgcaaccagaacggaagccggaaccgccagtccaactggattagccgtaccgtccacaaatccaagaagatcccggacatcaaagtaacgaaaaccgacagtctcatcgatgacggagaccgagtcgccgagttggtccagtagctgccgctcgaattcaaagcagatatctctgcgctccgagcgaatgtggaaaagcaaatcaccgctggtcgagaccgcggtgtgtttttcgcctttgacctcacggaaagggtgcagctctgagggtcggggaaaccccgtgagacgatcccagatgtcacttccaatgccaacggtgcatgcaaattgggcgctgaggtcgcggatggatacatttttggccaggctgtccacgcctgccagtgtagagcgcacgttttcaatggcattggacttgttggtcacagagagaacaaggaaggtagcgaatttcgtgagcggggcgtctacacgctgaggagccattgggacacggtgggtgttcatatttgctttttgatatgacttggaattgtaacaggcagatatgtgttgtctgcggaatgaacgcccggtgaggctcgcctggttggtgaaatgccgttctttccagaatgaactcctggaagcagctcgaaaggtatttgaatgaccaaaccgagaaattgataattgaagacgaatgttgggaatattagagatgaccagtctcccggacttggtcatacttcagctgctgacagtctgtggtacggagtagacgaagctcctcatctggtgtgagtgcatcaactgattatattcaggaagaaatgattggacaaatcatgttctaaaaatattggagagcgaagcaagaaaccggtcgatgtgacattgtcggtggtgacatcaccagccggaccgcggggaaatattacgtgtgtctctattcgttcatgattttgtagtaacttgattcttgcagatgttattcctataaacaaatgcgaactcatcgctgcgtgtacccaccatccacgaataaagccgtcccagtaacaaaagaagcccgtccaccactcaagtaaacaacaccgtcggcgatctcctccggccgacccatacgctccattggaaccgcattagcaactttctcctgcatagccgcgaagatctggggcgacttggtcgtcaacggggtctcggtatacccaggacagatagcgttgatgcgcaacccatcctttgcataatcctccgaggcagtcctcgtcaaaccaataaccgcatgcttcgtcgcagtgtacgcagtcgacaacgcaatcccagcgacgccctgaatagacgagaagttgacaattgagccccgctgcagtggcctgccatcaatcgaagaccggataggctcctgcttcaacatgatcttggcagcagctcgcaaaacgaagaatgtacccgtgaggttgacgttcaagatacgctcccaatccgatgtctcgcagaatgcagctccgcctgcgtgcttcattgcgattccggctgcattgacgacgtagtcgagtcggccgaatgtcgtcgcgacttcttggacgacatggttgacgcggttctcatctgttacattggtggggtaggtgatgacccggcatggctttaatcctagtccgcgctgttgttcttcgatctcggctttcacagcctccagggcttcagggccgatgtcgagtagggcgattcccgaggctccatctctggcgaatgtctttgcacaggcgcggccaatgcccgaggctgcacctgtgataagggcaattccagatacatccatttagggtggtttgcggggcttaggatacttgattgatctgctggtgtgcgtagccggaagggtgacggtgggtaaatggaacagagcaactgaatattgatggtttatatagtttcccacggagagacttgaatagacagcgatgacagcccagtatctttctccaaaaagactactttgatgcatgtggggttgtcgcggagacttgcctaactcgcgtctgatgatagccgtgcaacctatgacaacgcatctcggacttgctttcctatactgtagggattatttagtgtaaagacacgtactgctgctgatacatacgttcagtgcggtggtgttgcagctggttgtcaccttggattgagagcggatttcatacaccaagtgctaacattcaatttaaaatttggtactagaattgatcaacgatcggtaattgttgaatcattttggccttatttaatcatgttctattgctctacgtatggggatatagatatccaagtttacagtaatagtcactgaccattgatgaacaagtttataggtttattgcccacggtatcatattataaatcaaaatatctgatgtatcggcatggagcctttcattaaatccaaccaagtgacactcttcccgttagcacaagtcttctcctgccaaattcgttgaatattggccaatgtttcagtgaagcaagacaagccactacggcgtgccgaattcacaaaccagttggagaatgatgcctgaaccaatggatcgtcggcctcacaggccgcaataaacgcaggccagataaatcctgccgagccatgtactacagtagagtccgtgttctcgcagcgtagtagatggtccaacacgaccacgaccttttgctgtagcaaggaagcatccacgtcgtagattcgacggtagaaatatattgccagtgcattttgcatggcattgagcatattgtctatgacttcgtggtcgaattcagattggatattctccaggctgggtagtggcagcttgttgatgtagtcttcgagagtcttcgcccggctgatgaactcttttaagctgatgcagttcgatgcatcctctctttctgccgcgtccttttccttccctaatcgaataacttgggatagaagaagaacccatggttcagggataccaaatatctccgggtatagggtgttagaccagaagccaggtctttcaagatgcagatcattctcgccttcctcttgcccacgcactctcatcatttcttggtccagattcttccaacccgataagcgaaatgacagactgtcgaggctgtagtttccaagcccgctggtttcaatggctgcgtgcacgtgatgacgctgtcttgagttcgctccacaaatgaagacactctcatggatgatacgttcaaatacatagcagtgatgtagtaatcgtacttttcgagactttttgcgcggaagtcctcttaaacgaatgaacttttcagcttcaacgaaataatactccgattcccttcggctccctgagaacatcgtcacttggaccatggtgagcaatgccatcaagattgacttgtatttggctactttcggaaaattgtaggcggtcataagcatcattttcgcatgttgctgggctttttgcttgtaaattatggccttctcgctccatgtttgggatcgagagactcccccaaggctgaatgcacttatggctaatgtcccgtagaaggcacatagactggcatcactcatgttatcaccaagaaccaagcccgcgaggcagctcttggtgtgaggtataaaaagaatgtgccagggggttttagagtgtcggaggggcgtcatcaggctaattacagccgaagcatagtgcttgagaaggaacacggcatcttggggcagggctttcgtggtacccgttgaagaagtaaaaagattaggtaatattggatgattgtaagactgatctggaagacatgatgtgggtaaatatccatggggtactggatcgtcttccacggaatcttgatctatcatggcgtctaaacataccagggaaggcggactgggaacatgctctggttgatcaaatgtgaagtgcgttaaggactgagaccaaggcgacagaagcatgtcggacgaattgctgaatagaaccacatcttccggagaactggactgtgtctcttcaaagtcgttcatagctggttcacgcggaattgtgtcttgaccttggtttgatctaaacgccccgaatggaccttggtggatctcgatttcctccgaagtagttgctctttcgcattcttcatcaatttgggatagaatatgatgggttttctttggaggagcgcttgagacaagccactgactcatgcgttctctttccttcactgtaaacaatggtcgacgaaaccggaccccatgattgcgtagtgagctctcaaaatcaaagaagataactttcttgtatcccccgcaagctaagccaaaatattgacacattgaacattctggacgtccttcgtcgcatttcacatgtctacttcgacactattgtgtaggttagatatgcattatcatgactcaatgagatcggcggacttactgtgacacaccctgtgaatgagcgcgtatgggtaatggcctcgtgtacaccttcttgaggtgaatctgccatctttcggtgtttgaacaaggaaagtgttgtacaggagtctgcgggggaagtggatcggtagatcgccgatagcggaaacctgcctgtttcgacggtgcgcggtcactttcctattaggttggactatctatgcagtagttgaaggtcggaatgtcgctgataatgtgtaattctccgtgtttccccgcccactgcattgggatattctcaatgggcttgccgatataatgaaaatgccctaaataaggctatcccacaacatccgtgttgattagttccctttcgctcacttcgtttgtttcagggcatatactttcgtgtctagtgacgacctggcctcttgctgtaacagtttctatttagcctagctgctaacataacatctcggtcattgatttatgtcttagtagattgaccaacattcagtcgatctttatcccgactttcccaaaatgcctttgctccgacatatactggtatgcacttttgagatcctcgagtctgaaggtcttttgatccatcacaggatgaatattatgcgcctcgactgcgcggttcatttgttcaaactgagcacgcgagcccactacaatgctttgaacagtgcacttggcgctaaatgactccagcagagtaggctggtccccggatttactaacgtaaccaatgcccgtaatcaggccggcgattttgatagccgccagggactatatagagatgttagtggattgttcggggtgtaattgaatcaaggactataatttcatacctgtctcagcgtacctggcccaccgacctcgagaatgtgagagacacccgccttttcaggtgtaaggcttttagcagtctttccccaatctgtcgtcgttttatagttgatgacatggtccgcaccaagctccttcaatcgtacggctttctcatcagatgaagtagtcgcgattacggtcgcgcccgcggcttttgcgaactaaagggaacatggaagtcagtttattcagcgggatcccttgagcagtcgtcgcaattggtttacctgaattccaaaaagactaactccaccagatccttgagtcaaaacaacatcaccaggtcgaagagggtgatcagcgctgccgtaaagtgcattccacgccgtgaggcccgcgcaagtcaaagtgctggcttctaggaagctgaggttcggcggcatagccaccaggccctcctcggagaatacaccgcgctgtcgaaaggtcccgtctaaaaggccaccaagcgcagttttcatggagcgctggtcaagggggccagcatggtggccctggttgaacagcgtaatcaccttatctccaacatgaaaacgagacactcgcgatccggttgcctccaccgtaccggctccatcagatcctggaataatattggcattggttgggtagcgatattcaccctgtacgagttaagtgggtaaaccccagtggtcgtagctctcgtcctggacttactgttgctataatcaagtcacggtaattaattgaagcggcgtggactaccagagcgctagggtcagtattactttcaatcaaccgtcggatggattgtcggcgtacatcggactaggacatcgtttgggcccaagtcgggaataggaacatttttgctgaaatggagaccgtcgaaccctgtctgtttttcgaccctccattcattcgtagtaagtgagcccatcttgcaggtgatgatttagcgagaacaacaaaataacatcttaaggactacattcagttatagatccatccacggacctctctggtgctttgtaatctgatcaatgacctcgttgctttgtaatagacgggtgaatacggcagtcgaacttggtccaatggggggcttacagctgatcgaatgttcaaattggcatactggcctgcgtttgacctccccgaagtcatacacaatgtatactcagactcttggatcgcgtgggcgaaggttacctgtcccaaacgtcaatgacgaagacaataatttatgattgcggtccgctaaaaaagaaacaatatacgtctttgagcaagatttgcttgatgctggaaacacatcgccagaagatatgactctggatgcactgcatattgcagcggagaaggacacatggcaatgatccaggtctgtttagagcgcacaaagatgaatgacatgatggtgtttgagggttccctccgctcaaaatgcacatagtccagtcgcttgataccgacaagctcaatgtcaactcacaggactccctccctgcgttgggctcctttgcatctggctggtatgaatggtcattttgctgctgtcatagcacttcttgatcacggagatgtagaccccaatgctgctgatgaagaagaatggactctggctttttcagtctttcgagagaaaccatctaagttgactttgccgaaggacagaccggtttttccacctggttgaatagatccagacaaatgggcacctaacgcaagtcggtaattcagtgaagctgtctacgcttgggtcacgatttgaagagagaagtccgtcatgcatgctggatgtttcagaaatgacgaggttattgattttctcattgccaatataagtctctcgaacatagaatcatgaattatgagatgtcccggcccaacattgtcaatatcgaacataacacaatgatgtagccaaggccttttgtaggatgctagaatgaaaagaaacaggtgtatgtcatcgatgcctggaaacaaccaagtcgggcagacgaaaaaaggaaaagccataacgcgccaggaccagccaggaagaaaagcgggtgaaagatagaaagaaacaacagtcaagaaatgctccaatcagggcgaaaacacatcgtagcccccccaacgcaagacagagttatgtgtcccatttacatctgtctcaatccctctgcaagacgccgcttgccgaactcccaggcgttcattagaccttgttccgtgagatcgatattcttcatattgggtgcatctgcagccggtgcgcggctgacacgcgaagcgatcatgaccgggtcagtctcgaggatgattccgtcgtcgatagtctcgtcaatggtcagggagaggaggtcgtagttctcaacgatagtgcgcttgtcggttgcgcccctgatgagcgatcctgttagcatcggtcgaattcctcgaattggaatcgaaacttgacatacttgaataagatccccagagcatctcgtagtgacagtacaacattgtagagcaggacctcgttctcgtcggcacttccaacaacgtaaagcatgacgtcgctctccatcttgaagaccacaatgcggttatcgtaaaggatgacatcgcttgcggacttgttggtcttctcaaggaggcccttctcgaaagaacgctgctccttcacggtagggtaggggttggcaccggggtaatcagtcgagtttggtgcagcgccggcgggggggtgtggtgccgagaagtactttgcgtagatgcgggacccatcgtcagcggacatgacgaggaccgcatttacggagaacaaggagagagaaccgggcatggtgagttttgtggtgggagcaattggggaaatactgtccttgtgcttgttgatgctctcaaccgccaatctggccggaggcggagacgcactaatgttgttccgtcttcgagctctatactccgtacggatacagtgaccacagcacagcgtaagtgggaatgaatccacacttacggagtattcatctctgacatggtactaggactcagtcggcttcgggttacttgtttattaatcatttgctacattgtcggtacgataacgatatagttggcaatataaccaaccattcgttggccctaatactacaacggaatactagattaagttacacatctcaagattggggatatgacataaaatgagtggaaatacatcattgtgaaggatacatggggaataatatatatcaagataaagatcataatgtatgagactcctttcgaaaccacatcgcatggggaaacatcatgatcagatcgcgttaaaggaaacatgagaaatcagggaccttgaaatataggcaaaacatttcaagacatgaaattgcgttatgtgcatcataggggggtatgggtatgttaaaaatatggtcaaagaccaggttaagatcacatcaaatcatactgcccggagaacaaggcctactgcggcgctggttcatcgccggcgcgattcaaccacggaatccaactcgcgcggttcgccttcttacgtgccgcttcttcctcctccttgattctagcggtttcgctgacaaggcgcagagggcgcaacttgtcctgttgcatcaccgctccagtgtagttgttcatgccgccactggatcgaggagtgctagaggtggccccggtggaggctgtatctccgtggggatcgcttgtcacactgggggagctgctgcgaccaatccgctccggctgactggacatggaaggtgcacggctcatgctagatatatagcttgctgctccggagaacatgctctggcgggatccagggcccattgcagtcgggctaataggtccgccggagttgcgtccgccgcggtacatgtgaccaatgacactcgcggcacttgggtcgacttgttccgagcgactgcgacggtgggtggatgctctcacagactgcgtacggaagggaatgctgggcgcagtgttggggttctcattggggttgttctgtggggtttgcggtggaggcatcatgctggttggacgcgatcgaggttgggttgaagggcggggattctgaccaccaaccatcgacttcgctcgttgtatgagaccttgtgacgaatcatcatctttatccgaaggaataggggggagttccttttcactgcccccggtcttcgtggtggaagtttcatcatcctcgttccggtccagtatatgctcaaatccgtcatgcataagcagtctgctgataatacgctctatatagagcgtcagggctttgttctgatctttcagagccttgacctctccgtccggttgttgagcagcatcgctttcgggcgcctcatctacagattcaagctcatctgccaaggaccccagccctcctgccgactccttagtggggttggcatctcgcatgaaatcgcccttggcaaagtccccggtaagagtcttctcgctgagaagaagttgatagctttcattgtcctccatcaagcgagcattggccacgcgggcctcgagcaagtccttctctagttctcgctgacgaccgccaccgttctccatctcgacgagttttatctgtgattcggccagttcgaggcgtaatgactcgatgagtttgtctttctggaggagaagtgtagagttgttgcgggacgggctccgctcgatgtgcgaggagggcgcaaattgaccgtccacgtccggggaagatcgattgcggaagctcgctatagccgaggtcagtctctggatctcatcatctgcgattgtaggagcatgggtgtcttacaagatcgagaaacttggttacgatccccttctgcattcatgcgcatgtccttctgtgccatcgcgtccttcaaccgttgaatagtggcctgcatttcctcctcccgactagtctgctgttctttctcctgaagcatagcgttccgctccgcctcgtggttctgttccagatcccggatctgacgaccctggtcccgaatgtcactgttaagggcctcgatccgactgtctcgctcatgagcctggtcctccaacttggtttgttcactgatcgcttcatcgaggcgcatttgcagaacgccgagctgcttttggtattgttcagatgcagtttcggccttttggagttgttcccgcagttcctcgatgagggcggcattctgagcccgcgcctcttcttcggaggggtcattggaaactcgcggtacgtttgacatgctgaggttggaacggccaggttttcttgcagctgcgcgggctgatacgggagtcgaacctcttaaggaaggagaacggttaaggctagttgcgctgggtgagcgtgcgtgccctcgtgcggacccgttgttggagtgcggatctgcggttgatgatttgctggaactgccgggagttccaggctttcgaggcggtgctgacatgatgaaacgacccttgacagtccgctggtgaatgtataagaaaatgaaacgtatatagccccctattatacttcaattgggaaaaaggaaagaagatttcagggttgcaagtgtatttaggagcggtcaaaacctagtggacaccttgtggagagcgcttgtatgggaagattgaagggccaggaatgtggttgaaagctgtcacaggctgattgcgtgccacatggttgttcggaattggagattcatcgaaaacagcgtgaaagtcggaatgagaaaggaattgagaaaagtgctggttgcagaccttcgaatcaaagttgtcttggggaatgcggatcccttactgtatctaaaaatacgcaacggcttggaacaatacgagagagtaaggactttctggaagaggaaaagagaagtcacaaggggaaatttagtgaaataaggaggcgaagtcggttgtttttcttgttccaccgggtcgactggcctgctgagatggcgtgggctcatgaaagagcagtacaaaagggggatagatgcctgaggccgtgtatcggactaatgtaattccatctccacagcggaagttgacactttgctccactgcacctgcgcaccttgtccctacaacatatgctggaacagtcgagttcgagtacggagtatctgtatactacgttcggatgcatataatgctcgccaagaccctaggcgtcatctctcgggcaaccatatgagtcacttttgttatcgcaaagtttaacaacgtgcatgcaacggatcccaagttgggtatctatcacctgcacactcccaacccctagcggtcaggcaacgactcctgaaaatgtcaggtgacccacgatccaatgatgttgaactacctatttaggtaggttcaatgttcttatgtattcttaacgaattcaatcctggttctggcagggagggcaatatgagctgggtttccttgaatttccccgaggtttatgtcgccgacacaagagaagttgtgtcatctcaaaaaggaagttttcgccctcccataagagaattgcagtttacctcctgcccgtaggaatcaacagattaaatctagtcactgtagtttccccagcatcataaatctgaacgatacatatgtatagctatgacagctgggtggacgaaacctccaaatatagacatttgaatactttctaagccactgtgtcttcctgaacttgatcaacatcagcaccccatggcacgttccccgagaacgacttctggttctgattgcctggttggtctgcatcaaagtccaaacggtccgggatccttaaaccggctgggaaatggcatctcacaaaccatgtcgatactccatcccggtacagccaaggatcttctgtccgtcgctgccatgtttccagtctcgtcctcagatcatcgagtacagtagcatgttctgggtctttggcaagattgatcacctcatttggatcgttctccaaatcatacagctcttctggtgcgcggaaaaagtaatccttgagctttctctgcccgatcataacctcgctatctgatgagttccgaatatcttcccaagaaagagacccatagatgtcagccgcaaatggaaagtctaggcgccatgcgaggtttcggtggtatttgtatcgtcgatctcgaatgaacctcgtcggccagtagtttgtgacttcgtggaaagtatgtgagccgattacttggttccactccgatttttgggcatttgttccgagtagcggaagcaacgagcgtccaagccgcttctttgctgggtcctctacgcccggatgtccaacatagtcaagaacggtggggaggatatcgacgtatgagaccatgtcagagttgactgctggctggacatttggatgcttgataataagaggcaaccgcacccctgcatcgaaaagagttgttttagagttgatgaaaggtgggccgttgtcgctgatgaagatgacaagagttgattcagtcaagccagcctctttgagagcattcaaaacaaaagcgatcccttggtccaggcgatgaattgagttatagtactcagccaactcgaaccggacacccggagagtcgttgataaaaggtggaatctcgaccagatcgctattgtaagagcccttcttgatccgggagtcgtattcttggtcgttgccaaatccacctcgtgtgcgatcgcggtgtggatcgtggaaaccaatcgtcaagaagaaaggcctctcatctgccagagactcttggaagaagtcattggcttgatcagcgatcacagccacatccctcgtttcactctccttggcgacctcccagggatagactgccaccggtccgacatggatctttcccagaatacctgtccgatatccgctctgattcagcagctgtggtgcagtttcgacatgatcaaacgtgacaaagtgatggcggtgactggcaagtccgtactggccgttctggtgggtgtatatatgacggagcggctgccactacaggacgcggtgcttgcaaaggcatattcaaatttggtaccttctgcggcgagatggtcgatattgggtgtcttgatagttggtgtcccgtaacaaccaagttgcttaccaagatcatcggcgaccatcaacagtacattctttctgcttgccatgatgacttggtagatcgagtgaaagctttctaggcagctttttggggggaggacatggagagagaaaaccacccgactcaaaatatatttgctattggtggatttactcggtttgaaactagcctcatcttcgctaggcttgctgtgagcgcgagctgacaccaagatgatgtgattgctagtttagacctagtgccgagattggatactatgcttaccaattcttggtcttattatgaaaagactaaccagttactgactagttagttatcagatatcgattcaaaatgttgtcatctgcagggctcattgctcatcgtactaacgtctcaagcaacccacttttttgatagaggtatactaaccagcctatttgacttgaaaataaatcacgcataaacgatattatccgattgaatcatttcagagaatttgcctgtcttgtcaatcgcgaatcgcggccgatactagtggatggaggaattatggcgtctttcattaagaatattgtgttgaacggactgaagaccgtatacagactaattgtatttgaaacagtgcagctactaaaaccaggcctctagctagaaataccacaagataggactaagagtgaaaagatattgagaacatatccaccacgatgaaattcaccagtttgcttctgctacccttgttgcgtatcaccgttggccaactcatcggccccgtgggtccaacaaccgacctttatgataagacagtcgaatgcaacatccttgattatggcgctgtagctgataacaagaccgacatatccactgcactagagacagttttctcggaatgtgttcgcaaacatccgggtagccgattaattgtacccgaaggagagtatttgatcgagcgaggtgtgactctcagcaatggcacaaattgggcattccagttggatggtctgatcacagctgcatatggcggcgactggaatatcgcgcgtgagttgatactccaagggtttgcaggcacagagattatcaatgcaaccatcaacggggagggtgattctaaatttttattagatgtgctcgtcattgtcaatggtgagttcacatctccagacatctttggagcccaatgttgacaaaacagctgtggatttcgagttctattcttccaatggcaaaggtgcctttcaaggacagggttatctctaccgaaatctcaacaagtaagttatagaccattttatgagatgttgtgaagcttatacataaattccagcacggatcgcccgcgcttggtgcgtttgatctctccgaccaacgcctcagtgcatgacttgattctagtcgacagccccaagtttcacattatcttggattttgccgtgaatgttgaagcctaccatttaaccatccggggaggaaacctgggcagttatgatggaattgatgccattggaacaaactattggattcacgacaatgaggtatgcgtctcaacccctggtcttcatctttcacctgaactaatgatcattctaggttaccaatcgggacgaatgtgtttccgtgaaaagtccttctcatcatgctttggttgagaacctggtgtgcaatcaagcaggctctggtatatccattggcagtctgaatgtatctgctgaaatatccaacatcgtcagtttcaacctgtcgatatcccatcaaatgctaatattgcagtaggaagcacgcaatatcagcattatccaaggcaacaacatagccttcatcaaaacatatcctggtggatccggctacgttacaaacatcactttttcgaatttccgctctctggggagtctttatggcttggatatcaaccaatactggcagaatacgtttgagcccgacaccggtgctgttacattgagtaacctggttttccggaatttctctggtaagtcattgacaaatgttagttctggcagtattcttacaaagtttgtcaggctctgttgccgatggagtgaagcgtcctccactttacctcatcgcgaatgatctcacatacgctactaatgtcactgtcgaagatttcaccgtgtggacagaacagggtacttcggttgtgaacaagatcagcaatatctttggcaatggggatgatagctacgggtcaaataatggtatcaagtctctcggtgaaggagaatcgccctcaccttataccagcacctacaccattacagcatctccaactgactggcaggcccccacaactcctacgtgggctgttcctagtacgggttatggaagtaagctctctctcggcttcttttgtgtttcttgtcctaccagataactaatttctctacagcggcatctcctattccggtctatactccagctcctctgtggcgcccaggtggtgtggattatgatttgcattactggggaagcttctaggtggtagcttatcgaatcgagtatgcgacgatttggacactctcatttgtttacggggtatgttctatagcgtcgcagtgatctttggtatgcgcgaggctgtataggtgttatctttagtcaatgcatgtagaagaagagaaaatcgattattcgtggcaaagaagacagattcttccaagatttgaatgatatctagtattattttctctaagtttgtaatgatcaacctcagtattggataggtcaaggaacgccgttatccctacctaacttagtacgtattttaacttcaatgcacaatcacaccgaagcatagaattaagaccccttcgcatggcgtcagtaaataaatattttgtagccagaactcgagtcggttaattaacaatgccgtgaggtagaggtccgatgaacaagaccgactcgggagggagtgccgatgttgacagtggcgttggaatcctcaattctgatagaaatccaaggcgctagatatatatgtacattattgcaagacaagattttccaccaatctgagcaaatttaattcaacttttccaccgctagttgcctggacttggcagagattgatgcaatcaggcgctatcatggcgcaaaaatatcggctaaatgtcaaggcttgttttcattcatcaacgacaactatctttgatcaccgagcatcatttagaccattatagcgtcctttccaaatcgctaggaggaattcactatctctccgttgggagttcctccgctggcgtaaatggcatcatgcatatacttgagcacgcattttgtaccttgcagtctgagtcggattgatattgttcttcatttaatctaatataaagtgttctatctcaatgtatatctttgaatccagtactctctgtctcgttcttgattttcgactcatgcgccaaagatagccatggcatcgacattttccaaagagcttccagcatcggattctgggcctcagaatgacgatcatcatcacaaagacggttctgtggtgacaacccttgctgagccagaggaacaacgcgagtccctgtcgctgttcgctgcacttttcttgcggaaacggaaagtcgacccagaatctattgcaacagttcggagtgtgttcgatgatcctctgttggcgcaattttaccaaccccgtccggactacgagaatattcacagattcgatccggaagaaagatggactcaccgtgaagaactctcagtacgccgcaagaccgattggaggattttcttgtggattcttgtcatgttttttggactcaatctcgatcgaggaaatctaggcaatgccgcggctgataacctgctcgacgatctgaagatcaccaccaacgactataacaacgcgcaaaacatgtatcgtatcggctttctcattgctgaggtaccgtctcagatgcttggaaagagattgggcccagaccgctggattccctttcagatcatcttgtggagtttagcatccggaggccagttctttatgcagaatcgcgctggcttcttcgcatgtcgcttcttcattggcctgttcatgggtggcttcatcccagatgcagtcctgtacctttcctacttctataccaagtctgagatgccattccgtcttgcattgttttggttcgttgattccatgtcaggtgttgtcgcctcattcatcgcctatggtgttctgcacatgcgcggtgtggacggccgcgaaggttggcgatggctgtttctcatcgaggccctcattagtctcgtgataggattcctcagtttcttattcttagtaccgggccctacccagacgaagacttggtggaatcctaagggatacttcaccgaaaaagaagaaaagatcattgtgaatcgggtgttgcgagatgatccgtccaagggcgacatgcacaatcgccaggctctttccctcagcatgttgtggcagagcttgatggactacgacttatggccgatttacatcattggaatgcttttcgaaatacccacagcgccaccgaaaacttatctgacgctttcactgaaatcgattggatttagcaccttccacaccaccttgttgacaattcctgtcactgttttcgcctccatcaatttggtgcttgtgaccgagttgaccgagcgtttgcaggaaatctccattgtcggtcttctcactcaggtctggaatctcccacttctcatcgtcctttacacatcagctggatcgctatcaagctggggtttgtatgcagctagtttcatactactgggctggcccaacccgcatgcagcacatgttggctggtgctcacgcctcagtaatactgtgcgaactcgaagcattagtgcggcgctctacaatgtgaccatccaactttctgggattgcatcctcgaatatctaccgcagtgatgataagccattgtaccgccgtggaaactcacaactcatcgctatcaacgtcactactatggttgcctatgttctggcaaaggtatactacgtgcgcaggaaccaatggaagaaagctcaatgggataaattgacaccagaggagaaggcaacttatctgagcaccactactgatcaaggaaataagcgattggacttccaattccatagttgagcactgtcccaaaatatctgctatatctctactttggatccgagctcattgagatgttgtcttcactatatatcatacatcaagaagaaaagaattgtgtcggatgcagaaagctcaccgtgcattatttcaagttcagctatgttcaaaatctacgtaaagattcctaatcagataaatacatcggagaaaggggcatagatctctcattctaagtaaacctccaattaaccaaagtatcgaatacacaggtgttcaatttcatggccttcaagacaatgtatttatcaggatgtacatcagtagggataagcttgtggatcaaaggtaggtcgagatctcaacattgtttttacttcttcttagctatacctaacaaaggactctgattgtatctttatgtcgagctggtatattttagcttcttgagcgagctacaggtaagagaacataaaataataatacatacagttctaccgcaaaagtctccgtacgacccatacccattacatatatatctccgtacggagacttttgcggaggaactatacaaccgagatgcatccaagagagcgggagtgctccaaatcagataaaagtggaccgaaacaggattagtggggaatcttgttgaccaatcaaaaatgtggagctgtagcctgggctacggcctgaggactaaggcattaaatagggttaaacccttttgccacagtgctgcttggaaatcaagacccgtgaccacagcgaaaccctctttctctttctccttccgaaccctcgacaaccaccgacaacctatacccagttcgcaggaagtgccatcaccacccttccaacactcaaaatggcccgccgtcccgcgagatgttaccgctactgcaagaacaaggtgcgtgccgattcgatttcgcgagctttgaagatttgtgcgggctaccttggtggtggggagtgtgcatcaatacatcgccaacgaccacctcaccatgaccggaatagcacatttattctcatgcgagatatgcgtggcactggttgtggaaatttttggggaaattttttcttttttttaaggtccgcagttttcgctgacatcagtcttcaacatccagccttaccctaagtcccggttcaaccgtggtgttcccgaccctaagattcgtatcttcgatcttggtcgtaagaaggccaacgtggatgacttccccatgtgcatccacttggtttccaacgagtacgagcagctgtcctccgaggctctcgaagccgcccgtatttgcgccaacaagtacgttactcgatctgctcccacatctttcgcctgacattcatggacatgttctcatataactttcaataggtaccttgtcaagatcgccggtaaggaaggtttccacctgcgcgtccgtgtgcaccccttccacgtcgtccgtatcaacaagatgttgtcttgcgctggtgccgatcgtctgcagaccggtatgcgtggtgccttcggtaagccccagggtctcgtcgcccgtgtgaacattggccagattattctgtccgtccgcactcgtgacgcccaccgtgctaccgctcttgaggccctccgccgttcccagtacaagttccccggtcgccaaaagatcattgtctccaagaactggggcttcacccccgtccgccgcgaggagtacctcgagctccgcgacgctggcaagctccgccaggacggtgcctacgttcagttcctccgtggtcacggtaccgttgaggagaacatgaagcgtttccccgttgcctacgagaatgtcgcttaattgttgatgggttgatcagaatatgaagttcagaacgaaaatacttgagtgttcttattgtctttaccttgcctcattcctcttgatatcaatctcgtgcaatcgcaatgatggagttcttccgggagtcttttcatttgctcgcctaattgcactcgtagatctgtttatctacctgggcagtaccgtaaactatgtattatttttgttgccagccctggagtgggcaacatttgcgctttcgatcatgcacggatcatgcgaggtgcagtcatctggtggatatcattcttatctagcaaaactagcaaaagtctagaccgaactccatagtgggctttgttcaacgatcagcaggaatatgggtcacgtcaccaagactgcagcatcacccccatcatacaacatgtcctgcgggctgtattgctgatttcgtggagtcttcattcatgcagctgaatgattaaacggtgggcaattcgagtgcaaaaattaaggacagaccaatgtgaggcctaggatttagcatatatattctaaggttagtattacgcacttgcattcaccgctatcattatggctagattaggtttacgttggcaattaggaattagatcaaggctcattcattgttccaatccattatatccatcctttcgaaaaaaaaaagatcgtttggacatcaaagtatatataacctccttactgaggcggcgacccaccacaacgtttcttgtgcaattctccagcaactaaagggaaacaattagcccaagtcttcaaacaattataatctcacagagaccgattggaaaaccaatagaagcaaaagcgcaatgtgtgaggagaatatacctgtcaagtctgccgcagtacaagaaaccttcaaacaggtaccgagcgtatccttgaacgctgggcttgggcaagtgcacttgtagtcaatagaggagagacagcctgctactgcagaggcttcgttgagacaacgaatctgtttgaaatacgaaaaggtggtcagtcttctgagtcaagtcatacatcctggtaagagacatacaaggcagggactggcatcatccagaggatcagcgacggtccatgacaggaacgcagccagcgggaagaaaatagtgagcttcatgttggattggtgcgaaacgtgggtttagtagtggtataatgatagaagatttggagtatgaaagtggaggagttgatgaacacaggacggccttgctcggtttatcaatagtcagtatatttgtgtagtgataggagagacagtacattcttcgtcaaatcggtatctcagcatcaacaaacccggtgcctgggtgatacgtggaatgggtttcattggaatgtgagaccagctaagcttctgaaactgtcaaggttacaacgagagataatcgattggataccacgtctatttcttatccagtcggtacatattagcatgttggcctatctgaatgtcgtaagcaaagttagatccaaacaatacggtcttgatttttgtgatgtgacttcttggacactagggagattcttttggaacggccacaatcctaaataggacaccactcttgattcgctagattatgagcggctttatttatgggaataccatcgactgtagagctccaatatcctctatccatgtgcatgcatgttgcttaatttctcggaacgacttacgacaggccccactactacatagctttggtttcagtactgatctgcttgttccttattcaacggtatgttgatttcagaatggcaggactgaaaacattccatttgatgtctctaggttcgggatattccggggacattccattcaattcgatatccccggagcaagaaatcgagacgtccagtggttcttagcaagttaaacaccaaccgaggggaattcccatcgaaagttaaccatttctgcagataaaccagcctattgctgatagtcccctgacatagtcctcgccggctctcgtaccttcagaagaaaatcagccgcagaccaatgcttagtgtatgggatgaggatacgggggtcttcagtcctgtcattatctactttcctcttttctttcatagacgaaagagctgaagtatataaatcatacgcgatggccgctattcccactattccaaattaggaccccgagagcaaataccgggctttgattggttagattacatacaccgccaaatatcccgccttgaccaaatacgtagagctatccaatctcctatatttctcttattatatgctatttttcctagatctatatgctgtacactgagaaattcaagtccaactcagaggtacaagtccacaaatttacgcggtcttcgggatctacatacctatcacaggtgagtggggtagatgtccagttttctgctgggcagtattaactcgcatggtcgcaaagctagtccacgggttccagccccgcatacgtcaccctcaaaaatcctttttctcctcacaaacacagctatgaagcagagattctcatctttagacgtcaaggtatcttcaaatatgtgtcgaagaagatatcacactaacaaccccaggtcatcacccaggaattggcgtcggagtgtgtcaacctccgagtgtccaacatctacgacctgtcctcggtacgctcaattcttttctctattaccatggaaggacggcgagctgattatttattcctattagcgtatatttcttttcaaactcgccaagccggaccatcgacgccaactcattattgactccggttttcgtactcatgtcactcaatattcgcggaccgcggcatccacaccatcgccctttgtgacccgtctccgaaagtacctgaagtctcgtcggattacaggcatcacccaaatcggaactgatcgcatcatcgacttctcttttagcgatggcgcataccatatcttccttgaattcttcgccggcggtaacattatcttgacggaccgcgaatacaacattattgctttctttcgccaagttgccgccggtgttggtcaggaagagataaaggccggactcaagtacactgtatctaataaacagaactatgatggggttccagacatcacagcgaatcgggttttgcaaacactggaaaaggcacaggggctttctgcccaagaggaaaatgcaccaaaaaagttcaagaaaaagggaacggatgttttgcgcaaggcattgtcgcaaggctttcctgaataccctcccttgcttctagaccacgtctttgcgatcaaggaattcgatactacaacgccactggatcaagtcttggggagcccagatctgttgcagactgtgaaagaagtgctagaggaagcgcgtcgaatttctaacagctttgattctggtggcagccatccaggctacattgttgcgaaagaagacacgcgacccatcccggaaggagagacatcgtcaaaggccccgggtctgctctacgaagacttccacccttttaaacctcgacagtttgaaaacaaaccaggaataaagatcttggagttcgagcgcttcaatgccacagtcgacgagtatttttcatcccttgaatctcagcgtctcgagtcacgattgacagagcgtgaagaagcagccaagaagaagctcgaatctgtgcgatcagaacacaagaagcggattgatgagctcaagaccgtgcaagaacttcacatccgtaaagcggatgctattcaggacaatgtttaccgagtccaggaggcaatggatgctgtcaatgggctcgtggctcagggaatggactggggtgaaattgcgcgcctgatcgagatggaacaagatcgcggcaatccagtggcgcaaaccattaagttgcccctcaaactgtacgaaaacacgatcactttacttcttggagaggccggtgacgatgaggatgaagacgaggagttttctagcagtgatgaatcagactccgactcagataacgaagcagaacaagagacaggtcgtgcggaacgagagtcaaatctattgaccattgacattgaccttagtctgagcccatgggcgaacgcatcgcagtattatgaccagaagaagcaagcttcggagaaggagcaaaggacaacgcagtcgtctacgaaggcactgaagagtcatgagaagaaggtgacgaccgacctgaagcgaggcttgaagaaagaaaagcaagttcttcgacaggctcggacgccattctggttcgagaaatttatctttttcatctcttcggagggttacttggtcatagggtatgtggctctattcaacaccgttttatgaaatctactaatcctagtagtgcacgtgatgctatgcagagcgaattgatctaccgtcgttacttgtctaagggcgatatatttgtgcacgctgacctcgaaggcgcgacgccaatcgtggtaaagaaccgagcgggcagtgcagacgcaccaatctctccaagcacactatctcaagccggcaacctttgcgttgctacttccactgcttgggattctaaggctgtcatgtctgcttggtgggcgcatgctcatcaggtatcgaaaatcgccgagaatggcagcggaatcatgcccacgggtgtctttcaaatcaagggagagaagaacttcttggccccatcgcagctggtacttggatttggtattatgtttcaagtcagtcaggaaagcgttcggaaccataagcagcgatttgaaacacctgacattccaaacgccgctataaatcctgcggatgagactgaggcttctgagccgaaggaaactctggagccagaagcctcggggcagacagaggccaccgaagaagctaccgaagacgcagagaaggaagatgcggaatctgaagaggaagacgaagatgagaaagccgctactagaaaccctctccaacgaggcaattccgagctctcggtctctcagccaactcaagaattggcgtctgagtctgagtctgagccggaagaagaaccgaaggatgagctggaaaaagaagtcggagaagttcagggagaagaagctacaccagcagcaggtcaaaattctgtgcccgagaaaagtgaagaacggaatttgaacaatcgagagcaacgtgcctcgggacaaggcaagcttcttggccaggaacaacctgcaccacgcatcacccccactcgcggtaagcgagcgaaggacaagcgcgctgctgccaagtatgctcatcaagacgatgatgagcgagaacttgctcttcggttggtgggtgccaataagggcaaagctgcaaaggcggccaaggcagctgaagctaaggaacagcgtgaacgagaggctgaggcgcagaggcaacgacgacgggcccagcacgagcgtgctgccgaagccgagcgcaaacgccaagcccagtttacagaaaatggaacggacgattacaacgaggagacagctgccgccgaggctgcggatctcacatggattccagcattggtgggtacaccaactatagacgaccaaataattgctgctattcctgtatgtgccccgtgggctgcccttggacgctacaaatacaaagtcaagctacagccgggctccgtgaagaaggggaaggccgtcaaggagatcgttggtcggtgggtgtccgagaccaccaccgggaaggtcaagaaggagcatgccgaagatgtcgggatctctcgtgtcgatgctgagcgtcttcgggaacgggaaggagagctcatcaagggctggaaggatacggagattatcaacactatggttgtgggcaaggtgcgcatcatgactgcaggagctggaagcggcggcggtggtgataagggcaagggcaaaggtggaaagggtggaggtgggggtggaggtggcagaggaggtggtaagggcaagaagaaatgattgggtcttgtgtatgtattaggagcacatatattagagcattgtattcaattcaaccaggatatacgagatatcctaattggtgttgagccgatgtatagttatcaagcctggtctctttatgactgctgatctgccacaaccccgcttcgacccgttcatatatacttatttcaacctcatatactatgaataactcccattccatatgtattgccaataatatcattggcgacgtgacgatgccccccgtgttcctgatgcgctgagtcatccgacgtcatgacccgaagcgattttcttgcgatcttccggctctcatcgcttctgacaagattgtgcagaatgacagccgaccgcgtacgctgagacgacctctcattctaccttcaatagaagagagtttgccccacgcaactagagccaggcctcttcaggcatcatttcgtccctgatctggtagtgtgtgtgcctgaatggtgcatcattgaggtcttctcaaacaccacgttgctttccactcgtgcttttgccggccactgtcagcgcagttgtgccagattcttgaccagtatgtctatacaaacgcgggttgtccccgtccaacggctcagccaagggcctggcgatttatctctggcggaatggtgggagaaggagcgcagccaaaaaacgcccgagtcccaggccatcgaagaagctgccaaacttctccggtctagtgacatccccgttgcctttcctaccgaaactgtatatggcctaggagccgatgccacgcgcagttcttctgtccagggaatctaccgagccaaacagcggccctcggacaacccgttgatcgttcatgtcgactcactggacatgcttgagcgtctgcttaatcctacctcccaaggcagccctaaatcaaccagaatgctgccaatggccctcccttcaatctacaagcctctgatcgacagattctggcccggcgcactgaccatcattttacctaacccatccgggtccatattggcgccagaggtcacctccaacctgaccacattcggcgtccgcatgccctcttctccactggcgcgtctactcatccacgtaacagatcgccccctcgccgcgccatctgccaatgcgtccactaaaccatcccccacaaccgcgcagcacgtataccacgatctcaaagaccgcattgagatgattctcgatggaggagcatccggcgttggtgttgaaagcaccgtggtggacgggttatgcgacccaccggcgattctgcgccccggcggcgtcggcattgatgaaatccggaaatgcgcagggtgggaaaatgtagcactcggctacaaagacggcacgctagacgtgaaagatgttccacgcgcaccgggcatgaagtaccgccactactcgccaaaagcacgagttgtactcttcgattcgacatccaacctagttggagtgatgaagcatgtccaaaaggacttgaaagacacagccattggcgcacacaaaattggtattatccgcacgcggaattggcagctcggcttggggctcgcttcagaagatgacatcgccaataccatgacccccgtgtcttctgccattgagaacattgtcagtgtcccgatccaaatccccgtgctggagaatggaaaacccagtagccgtacgaagatagcatacgattaccatcttggctcagatgcggtctccatcgcgcatggtctctttgccgccctgcgcgcgttggacgagcttaatgtcgatgtcatctacgtggaaggcgtgtcagattgcgagggtgatctggccgctgctgtcatgaacaggctacggaaggctgctggtgctgaaatgcgggtttagccctggagatggagtccgggtttttcttttcggggtttagatagaggcttgaaaagtgtgaatattagatttcaaatatattttaacatacaatattatatattattcacgtttcatgtgcacggagtgcacatgtattgaggattatgattggaacctcttggacttacccatttggtaaacatctgggtcctgttgatcttcatatgacgtgaaattcggagacctccggggcaaaagcttatcaatagacttaattttgggattagaaagtgatagaagacagctgtgtcacgaaaatgaagagccatgataacctgagactgcagcgggggagaaagcaaactcgtccggcgcttatacctcgtcccacattgacctagaaaattctcaaatccaaggaaacttactcactgcaacccgcaacaatgtgtcaatctcctttgcacgagttcctcaaaggcctccctaaatgtgagcaccacgtccatttggagggcacccttgagccagaactcatcttcgagctcgcggcgcgcaatggtatcaccttgccgaccgacccagtctatacctcggttgagacactcaagaaacgctatgagcacttcagtaacctggacgacttcctacacttctacttcgaaggcatggccgtcctccgcaaggaagaagacttcgccgacctagcgtgggcatacttccaaaaggcgcacgcagacggcgtccaccacgcagaggtctttttcgacccgcaggtacacgaaagccgcggtgtaccatacgacacaattgtcacaggcttctcgaaggggtgcaagcgcgccgagaccgagctcggcctaagcacaggattaatcctttgtttcgttcggcatctccccgtctcgtcagccgagaaagtctacgaggagttcctggctcacaaggactttgagtctggcattgtgagtggactcggttggtcttcttcagaagtcggcccgccgaaagacatgttccgcgagatctatgcgtcagccgcacagaaaaatatcccgctcacggcgcatgccggcgaggaaggtgatccgacttatatcagcacggcgcttgagcttggtgcccagcgtattgatcatggtatccggctggttgaagacgaagagttgatgcggcgtgttgcgcgtgagagtatcttacttaccgtctgcccattgtcaaatgtgcggctgcgctgtgtcacttctgtgaaggagctgcctattcggcggttcttggaggctggagtcaagttctcgattaacagcgacgatcctgcttattttggtggttatattcttgataactactgcgctgtgcaggaggctttccacctgagtgtgctcgagtggaggatcattgcagagaatagtgtccaggggagctgggttgaggattcgcgcaaggtggagatgctggccagtatcgaggcgcatgtcgaaaagtacacatctttgcataacatcgctgtataaattcggattgtcggtgtattggtttctgttcgagttgttggctgtggtgggcgtgagcgtgggcggtgcatctgataccctgtgtttcaacacttttataccatttttcaactgaagtatataataaccaggcgaatagcaagttaaatatttattctcattcctagcggagtaccttggaagacagtcgagagtaataatcactgatgccttgtaaatcaggcctcgcatggatccatatctggacagacgactcctcacttgcacttgttgtctgaccgtcggccctgcacaacagtaccttatgcccccaaacatcccccgtggtacctggaggctcacgaggtctattttacgacccctactacgatcccagataccatataccctgcggctcgcgtcgtgtttcgcaggaatcaacccaggaacaaccccgcagcaaagcgcacgactacttaatatcttcaaacgaagccacagacagagcaatatacactcaaaacacaaaatgtccacctccactccggaccgctacaagctcgtctttttcgtcccgactgccaacgtggagcactgtaaagaagccatcttcgccacaggtgcagggtcattcccaggtgggaaatacaccaagtgctgttttcaatctgttggcacaggccaatttctgcccaatgagggcgcagacccggcggtcggggctgtcggtgctttggaacggtgcgaagaggtcaaagttgagattatgtgtcttggtcggggcgttatgctgaatgcagtcgatgctttgatcctggtgcatccatatgaggaggttgcgtatgaggtttataagatggagaacgtctagttgcgcgactcaagatgtggttggtggaacacagcgtaataatgtgatgcgactgggaagatagttatctagttctgcaatgatcaatttcacaagtatatttcaaggaatttcgagtccaataaaacagttcgagagtatcgttgtctcaaaacatggaagttgtgttggctgtcttcgaagagcaattgtatgataacggattggtaaggcggtagtaatccctggatgctgatttgcccagggcccgccccgagtaaaacgcctcgtcaacttgacttctcctccaacctccaacctcatctccccccaattgaccctcacttatcgcccgtgatggcctctaaactcttctccgtcccgcgggtcggccgccagttggttcaccagctccccaaatctcaatacagagccttctccgccggttcgcaacggttcagcgaatccctttcggtggtgcgtatttcgttccacccctcttatgcttcaggcgccgattatgccgcagggttgaggaatcaaagactcatatactgactattgttgtctctaatagcatcgcaacaaacccaacaacaacccgaccctcccgttcaagttttccgagcagaacctcacactcgccgatgagatcctcaagcgctaccctccgcagtacaagaaggctgctgtcatgccactgcttgatcttggccagcgccaacacggctttaccagcatcagcgtcatgaacgaagtcgctcgcatgctcgagatgcccccaatgcgcgtttacgaggttgcgaccttctacaccatgtacaatcgcgagcctgttggcaagtactttgtgcagatctgcaccaccgtaagcacatgaaatcaacactatttcctgctattcctaattcgcaatcctccagaccccatgccagctcggcggctgcggtagtaccgccattgtcaaggccattaccgaacacctcgggatcagccccggccacaccaccgaggatggcctcttcacatacatcgaggtcgaatgcctgggcgcttgcgtcaacgctcccatggtccagattaacgatgactactacgaggatctgactccggagtccatcaagaacatcctgacagccctcaaggactctgccaccgcaaccggtgccgccactaagattcccaccccaggcccggtgagtggccgccatagctgtgagaacagcgccggcttgaccaacttgacggacgtgcctgtgtggcacccagagacgatgatgcgcaaggacagtgcattggacgccgcgcccaaacaatagaaaagcacaaagaagaagaattattaaaaagagctcttcattgccgtgggtcaattccggatggggaggatattataatggttgtgcttttttcgaatggacacgcaaaaccgccatagggcattgcggtcacactacggtcaacttggggaatgattagaggccactgcgcccttcgccctgaggcgccctgaatcataatcactcttgaggcgtccgaatttttttttctgtctacatcataccatgtacagtacgtttgttcctggttcttattgaagtgatcggagcccggatgcagatcaggcctagtcactgtggaatatcggcaggaccaaatcgcagattttttttccacttcctcttttacactagctattgagctcgtagatgggtgagtacgtgtgcaagatattgttggttcctgctagttttatgagaatttattgcattgcatggcatcatatcgagatatccatcctcgacctccgctggctgagttagggctagtatataaatttgtctttgtcaaaacgctcaactccctaccgggctatacgttgctcgtgtttatctagccgccgagctagtatatccaatcatgttttataacatgtgctctaatccacaacattctttcttggcagacggggcaataattcataattcatacagcaggtgagatttagatagactatctgtgcacaccattttgttgcacgatttcattacttttacatgagatgtatgcatgaaggaagcaaaccacccgtgtccaccttgtttaccacgagttcttaacatgggcaaaaaaaagcgccctcatgacagtcatagcaaccggcataaaatccaaccgcacaagtggcctcgaggccatcctactctggcatctcctccccttcgcatccgatgtcgtttggtaatacttcttcttcgggaaccaaaacgtggacaccttgacgctcaacgagtttgcttgattgagcgttctggaagatgttgacttcgtatgtgttcttcaccagcaaatgatagacatggacctcgcgctcctgtccgaatcgccgtgcacgtccgactgcctgggtcatgcctgcctcaaagtcatggtcagagggggcgaaatatggcgacaagaagataacgtggtttgcgcattggagattcctttaattggatcatattagtaatgtttctaacaagaataacggataatagcagagagaaatgacttacaatccagctgccatggagtttccgagattcaagatcaaagccttcggtctagaaggtggttgcgtcatgcccttttttagtttcggagcctcagtgaactcatcgattcccttcaagttagtctgtgtgaccatgcggtggtcgatgttcgcagcttttagggcattcgataccacaggtaacagatgattgatttgcacaaagatgaggacaagctcttcctctgggacattgcggacgatctcaactagcttgttgagcttggtgctctggatttcttggtcttcgctgacaaggatttcaccgggcacgatcttggattggacaatttggccgccgcatccaatgatagggcagggtttgcgtgatccggcggcaatacaatctttgcagaggacatgaccgcaggttttgaggacgttgacgtcttctttttcttgcaagtcgccattacatttttgacataaaagaattccaatggtttggatcctcactagatgttcgtagaatcggtattcccggtcaatctcgaggacctgtttcaagagagaggtgacatcagcggacaaggttttttcgacagcgatccaaaccgaattggaaaacgcatccacgggttttccatattctgtggctctaggaggacgctttccagtcgctttgttgccagtcttcgaattttgtatcttttggaatcgctgttggagcaaatcatcaattggctggtgttgttcggcgagtttccactcactgtatgagcggatgatgtcctctaagagctgtttgaatcttttgttgagttgcgcgtccccaaaatcaatcttggcgacgccattcagggccttttgccagttgttgggatcggtatttttcaattcgcgataccaaacaatcgctgcctgtcgagtgatcgagtccactttagtccagatctcagcggatttctttttgtcattctgcgagccttttcggcacttctcgaggttccatggaggttgtccgatttgatttgtgacgcaggacatgatgagagcctcttgggggacctggctcttagacaaaatggtgctcaaggggccaggaatccgtctcttattttccttgacagctcgcaacaatgtatcgtacgctgtcttttcagcaggcgactgttcggtgacgacaaaggttgtcttcaacgggatatgtgtgatgcgtgcgatgttctgacgcgcaaatcggtcaaggaagttttgggcatgttctcggcggttttggtaccaggcgttgctgtggggggcctggtaatattggaatgcctcaacagctgtgtggttcttccggatgtttcgtagtctgctgttctgcgtcggcttgtcgcaatcgccatcgtcgtccacaccaaggtgtaagccaaggtaacgcgcaacactcttaatgtcggcaaattcacgaagagctggcgttccagaaaggatccatttagagcgtgcctgcaatgagagcagagaagcctgtctttcctccccggcatatgtatattcgtcgattaccaaacggttgaagttgaaagcgtgaataaatgcggctttgacagtgcgccagtcgtgttcggcggtcttattgatatcaaaatctttgcggtcatctttcacggcagttgatttggctccaagtttctttccgtcatcggttacttcggtcagctctgtcaatgagtgtttttgtcgctttcctcttggaccttccactgacttcctactgtgcctccgcttgcgctggcccgcttcgggggactgtctcgcatcagatgcgccaaagtcctcgaaacccgagtcagactcagaatccaaattcctttcttctcctgcattgcattcatcacgaccatttttagcatcagcaaatgcctggccacgcaggcgccgagagggcacgtaagtaaaattggcctgtgtctcttgaactcggcgacgtctggcttccaattgccgaagcattgcctcagatccttgtgttttcaatatgtcaacagactcccgcaaggaagcacgagcattgtgaaaccagctatcgaaatttcgacctgttcctccgctcgattttgcgggagcttggggtgttccggtaaattgttgaagtcggctgtagtatgcatcgttcgccaggatactccatgacaaaatcacgatatctgcatcttcgacttcccggattgtgatcttgctgatcgaggatattgccaaaactttgtattttcctccaaggaacttcttggtctccgaaacccactgcttgaagacgttgctgggcacgatgatcagtgttgctttggttgaaatcagcccgttctcttcagggggtttgcagtcgctttcatactgcgtgtcaataagaccaagaataacagccgtcttgccgtatccaacttcgtcggctagcacgccaccgcgaacaacttttggcattgtcgctttgacttcggcacgccaaggcattaaggggaggatggattcttcaacttcctcttccatgaatggttccatctcttttgcttcttgtgtaatcatccagctcagtgatcgaagctgttcatcacgaagcttgaatttgaaattgggaggttgtggcgaaagactatcgttgtcgttgctcctcaaagtaaaaatgccaggggtttcttgactcatgtcgtacgcatgagggagaagtcgccagaaagatgttactccctcatggcttgcggtaccaaacaatttaccatgtgcctgatgggtcaaagcttgcacattgagagtgaaacgcagttcagcatctccatgttcgttgattcgtctgaagaccaaaaatggcgagggtcggtttttgatggcacgctcgtagacggcagcgtcctgcggattctcgtatgggatgattcgatctctgttgtcccggccccaaaggatactaggggtgggtgggttgcaggtgttgcaattgccatttgcatgatgtttgaggtctgaacaatccgggaggatgatttcgttccagtctttaaagtcggaccacgcagcaatcttcgggaacaaccaagcgagacctttcaattctctcatagagacctctggattccaggcttgccaatcggaatttgcgtcaggtaggttgagaatcgatgtcgttgctgacagcgaggtgagagttatacaagcatcatgacagttctggttttcaatcgagacttgcattccttgttgcaatgtgtggagggtaatctgctcggcaggacattggttcagatgtgccttgggggccttggcccatcgacgacagaaagctttcacatcttgcgaatccatggtgacatttaatgatgtccactttgaagataactcggcgatcgtcattctcacatcatatccaggaaggcggtcgtgttcaagagcgaatacaaaggcatcttcgtctgctggtccaatctttgctgggtcaaggaataggaaaattcggggtgcatgggcggtagcttttcttctgtacaatgcaccaagggctgttccacaatcagggaggaattggtacattcctcggacgtcgaaatccagagctgcgacgttttgatctgatccttcaacgaaaatactgtcccagacttttccatcaacaaatttagcggctttaataccacactccgattggaatgatcgaacttggtgtcctctgccagaaatctgaagtaaaattggggtgctaatgggtgaggaaatttcccatgtaccctcgacaagcgacccagaagttggactcattctggcaattggcttggctagaacttcccggatgacgcttctcctactcgcggacttggggggcttcgcgtacaacagccactggaaggagtccggaccgatatcaaggtacaagctggaatgcgtgccgtcataaaccactcgccattttcttcctcgcttaatctcaaaaaatcgaaagacatcgtgcacagccgccttgacgcacataatgaagtcgggccaaaaccgggggaggttggtgatgtggtaaagggatctaaacatctcaaaccccaagtcggacagatcagacagcataagcttcatcggaacaagcgccttcaaattcgctatgaattcagacggcttttgtcgagaaagtggggaaacatgtagatatgaatgcgtggggtttccacgacaggatttgcaagcggtatgtccgcacagtgtgcaactataaattgaatcttggacccgagtctgtctctcgcaggagcagcacagaacgctgctcgctgccttgactttgagaacagcatggtcgataagaggtgtttggacgacttggaggttacttctcacaaggctatgggcctcgctgggtacgagaagggacttggcctccgcctcgccagagtttgttgaaaattcctcgccgtcgtcaagaatctcatgcacggctatcagaccagccagcatgattgcacacactaccgtactcgtcattgcatttcctgccatatccatcaaatcggcttgggtttctctcgtgagtaacattcgatcgaggggcagtccttgcaacgaaagagcctccgtgccagatacggggccgccgcgggttgtcacaaatggcatgcccttcggtgtcagacaccctgcgataccagaaccggcaaggctgtcattccctcgatcgacgccctgagataagtcaatccaacgcctgtgaagtgaattgttagtacaatattcctgaagtgaagattgagtagacttactccttgaagttcatgtcataatcttgaagcatcttcttcaggaaattcatatccacggtctcccacactctctccgactgtgtcttccagaaacgatgccaatagaagtccggtgtcttcagttcattgatcccgggaagggatcgagtgattggcctctcgctacctagttccagttcgtcacggtgccgttggtgacgaatctggtactgatcccagctggtttcgcttcgggactcaaggcgggctctcatctcgatgagctcgagtcggcgatcgtcatcactcagcaagaacaaccccaccggtgcactcgctggccgtttgaaacgatcagctagctcacgaacgcgttgagtgacaatttcaatgccactttgatccatggtgtctccaagtaggcccgctgcttccaagcggtgcttgtcaataaccaccatgtacccgcgctcgcgtgtctgcgggatgtagtaatgcttcgtgtcgacattgacacaaacggacatgtacctgagctcctcccacttccccttcatctgctcccagggcgcattccggacattctcctgaacgatcatgcggggtcgatatctcttcgcgtaccgcaagagaccgtcgaacgtagctcccgactcgccgccttgctgcagcgtcttctggcggttgttcaaaggagagaagtcgacacaggcagttccagcaactaatatgtcgaggttaccgggaattgcttctaatgacccgtaggcggtccgccttgaaaatcaaagtcagtattagagtcatgtcagaggaagatggatggggtacttacgcctcgtctcctccaagttcggtgatgtcccgaaagaggagaggggggcggaagtttcgctcaatgtacgactgcttgaatggaacaatctcacagctgaaagcgtgcaagatccgaagttgctgggcctccggcaaacctatcaaggtaaaattagcaattgttccatggtcatattccaagaagcaccaagcagagagtgagagaggtcagaccgagtcactggaatgaggtggaaatcattaccaggcaaaagcgatcatgccatggaattcagggcgaggttaaggcaaagttagggcaaggaaggaaacatgtgacttagaagtcgggacaaggcctcaaccatggaaccagctacaacatgaacctcaacacgaagacaacaaacgaccgactgggggaaatgggaaataaaagaaaaacgagatgctgcactgcctgcacttacccttctgtatcaattccagggctagaagcggggcttcggttcctgagcacattgtcgccactcgaagtggtcgactgccgagccgaatgaggacttgctcgagtccaatttccatggcctttgatgccatgtcagcaaaaatttctctcagcgtatgcagaggggggaggttattggctagataccgacccgaagggatcatgcgtccccgccgcagctcaggaatctcatcggccccggcactagactcctgatcatccattgccaaaccatcccccgactgctgctgagaaattccctttgacaccatgatgtgcgttgcaggggctgagaactttgaggtggtcgggatatcagataatactggcaaaccagacaagaagaaacacgctgaaaaaaagcctggaaaccgagacagttacagtaatgacctttattaccggttcaggcacgaagcaaactgcaaatatgcaaaatgatggatgaagcgatgatcgtctggaaaggtgaaagggaagacgactagaagaagaagaagaaccaaagagaaaacgagatagaaaaacactgcgcgacgccgagacaacgatcgagctacccccgttttatgcgacggtgggttctacccacgaccgcaccaggaattccggtagctctcgctcgactcagcacgacagcatgtgccggcgacctggatcaacctacgctgagaggtacacctgcgctaagatatactactgcaagacgataaccaagccaggctcgaactaattaggtaactgcatgtgacggcgactcatctccatgcggagttagagagacgctggcactgacgaatacatctattccacctaggcagtactctcaatggttgtgtgagggtagccttagcacgccgtttatcattggcctgttctgtactatcagaacattaaccgccattaaactaatgttaccgcaatccaaatggttcagtaattgatacggagatcaagccccaatcacagactaaagctaaaaagtgaactattgctgtctttgctgagtttatgtactatgctgataactacttgcttcttgaggatatagtgagaacggtctagacgttattaacggacattatttttcaagcagaagccaatgtatctcttgatggaagctataatatatagaccgacaagcaagagcttcatataacagtacataggtaccatcatttgtcggccaactttctgctttcttcggacgagatatgctagtttcccattgtgtcccttctttgatgtatcttaagtggcacagaatgagcctatggtataggcaatggagatgttatggcaaatggttataggcaccggagtgtcaatgagctcatacacttctattatactcaaatattgatatcaatgtcttctctgctgtaggtattgttatcgagattacggattatcatgccggtctcgaacgtgagtagtggttaattgatgggttggcagttatccaccgaacattgaaatcatgtgcacagatagaatttgctgaaacgtcactataagacggctgacagccattgcgagagaatgtctagataatattaattctatatttcaccatgcagcttaagcaatcccacgaatggtgaggtaaccatagaggctttctccgtcaccgacaaacgcgccaaacatattaacgggttaaggcatagataaacactccaaagggaaggcaagtttaacgttgattgtagaaacgaaggaccgaaagaatcaagatatcattctgttactattttgaaggaataccttgaaattgaccggtatgcaaatcaatgaggaaaaatgacaacccctttacgccacccattcgcctagtacagtggcataagaaaatgagaaaaaaaaataattggccatgtcatgctcgctctcgacgagcaagccacaaaatatctgaatcgaaatgcagtatcaagagagggtaataccctaccgcatgccaccctgcatcaattgctggcgtagcagcatgatctggcttctttccatgggaggcagagcatcaatagcagcctggggcatgctgaggacttgctgaaggagttcctcctggccgtgcatcggggcggcaggttgaatcgggggaggggcgaaaggagtgccggtgacaggcggtgtagagatctgaccaggaacaccatactgttgaaattgttgaggggttggctgttgagccacttgggggggctgggcggcctgttcgacgatagaaccaagcagctggtattcgaccagattcatgaggagtagagcctggaagacggcgtaggcgagctgaggcgcttggcgcagcagctcagtggcacgtgctgggtcggcaaccgcaagagatttcatttgtgtcaagacatcgagcaattgatttggtgggagggatgcgagagtatgggagatggcgttggggcagtcgatctgaggcgggagttccacgcctgggggtaaaggaggcagtggcgctgagcctgtgatttgttgctgctgcgtggtatcttggttcatcattggttgcgactgctgcgagtaatctgggggtacggaatctttctcgttgttgtgaggccaatcaacacggatcttgcggcccatgacttcgtgatcgttgaggttgcgcaccgccgaggcagcggcgtcggcgtctgcaaaatctgcgaatccatatcctttgggtttgccggtctcaggattcatcatcaaccggaactttgtaacggtaccggccgtgctgaggatgtctttgacttgttcctcggtgaggtctagagaacgatcagtatcgcgcaggttagacatgcagctacggttacatactgtagggaatattccccaggaacacgctcttcccagtccgatcgggcgccatgattgcgataggaaatgagatgtcagtgagaaagcgaagaagtcgaggcaagcaagaaacgctgattctgcccgactttcccacaccgcccgaaacctcacctcatccgctcaagcatcataccaagtcaatcttcatctatctccaatcttttccgcgcacttactcacatcatgtctcaaaatcaacgggaggcttgggagcgcctgcagcttatgctgtcgaagcgtaaggctggcttcggtggcggcatcccatccggtggtggccgcggaggcatgggactcgtcggaactctcgttctggccggtattggtacctatgtcgcgtcaaatgctctgtttaacggtatgttaaagtcatctgctcaaggaatcaaatttctaactagtttttagtggacggtggtcaccgtgctatcaagtactcgcgcttcggtggtgtccagaaggaaatctacaacgaaggtatgaaaacccacgagccagacacggagctctctctcacatttggatgaccttaggaacgcacttccaaattccttggttcgagaccccaattatctacgatgttcgtgcgaaacctcgcagcatcccttctctcaccggtacaaaggacttgcagatggtgaacatcacctgccgtgtcctatctagaccccgtgtcgatgctctgccccagatatatcgaactcttggacaagacttcgatgagcgggttctgccttcaatcgtcaacgaagtgctgaagagcgttgttgctcagttcaacgccagccagttgatcacacagcgtgagaacgttgctcgtctggtgcgggacaacctggctcgccgagctgcccgtttcaacattgctctagatgatgtgtctttgacagtatgtaccttctcccctacctctagcccaaacagcttctaacacgccatctccacacagcacttgaccttctcccccgagttcacagccgcggttgaggccaagcaggtcgcacagcaagacgctcagcgtgctgcattcatggtcgacaaggcccgccaagaaaagcaggccttcattgtccgcgcacagggtgaggcccgctccgccgagcttattggtgatgccatcaagaagagcaagagttacatcgagctccgacagatcgagaatgctcgccaaattgctcagatcctgcacgacagcggtggcaagaacaagctctacctggacagccaaggattgggcctcaatgtcaacgcccacagcgaagagggcaaataatttcattccgcttgatacttaatggcgctgcgtggagggatgtgaattattgtacaaatagctggattaccaagcatctgaatgcggtctcttctctattttcttttcaagtctccttgaaacatagtaattctttgcaagtagtgtagacctctaggtaggatgcggggacaaaggcggcgagacgattttttagattcggaggggcaccacttcggtagttcaacacacttgactaggattgactagcaagtatcatctttaattcgtgagtatcagttggaaaaaccagctcaacgagttttctttttcttttggaattactcttcgcaaaaccccgctaacagcccttagagcatgcccgaagtcaccgacgataccccagtgcacctcaccgaggtcgacatcgaccttgacgtgcaagagattctcctcgccgcttcgcagcatgaccagtccaagctgcgccgcctcctccgcacccagtctgtgctgccagatgctgcaaacgttaaagacatcgagactggcttcacacctctgcacgccgcaatcgccgcctgcgagcccgatacagaggcagtcggcatcaatggctcagactccaatccgaatgatctggatgccgagaccgtgaaatcagcagtggagactgtcaagtttctcctgcaagagggcgctatctggaacgatctagacgcgaacaacgagacacccggctgtatcgcgggccgcattggcgcttccgagctgtacgagctgatcgtcgacgcaggtgtccgcgcagagttgttgatgaaccgcctcgacgcgtacgaggagctatccgatgatgacgaagaggaagaggaaggcgaccccgaggccgagacagcaccggaactcgtcgatgcatccgccgaacccacgacagaaaccacaaccacaaccacaaccacaaccaccccggccaaccccgaagtatccaactcgcaatatcttgaatcgcgcctgaacatccaaaacgaccggatcctggacgcagaccagaacggcgtgatgatgcgctgggaaagcgacattatgcgcaagtccgcgatagcactgctcccgacgcccggcctgaaagtcctgaacatcggtcacgggatgggcattgtggacggattcttccaggaacgagggccggctgtgcatcacattgtcgaagcgcatgaggaggtcgttgcagagatgaaacgacgcgggtgggatactaagcccggtgttgttatccaccagggtcgctggcaggatattcttcctgaccttgtggcggctggggagactttcgatgctatctactacgatacctttgcggagtcatatagtgatttccgggacttcttctctgagcaggtcattggattgctggagcaggagggtcagtggggattctttaatggtatgggtgctgatcgccaaatctcatatgatgtctaccagaaggtggcggagatggatctcttcgaagctggctttgatgtgcagtgggaggagattgccgtgcccaagttagacggtgaatgggagggtgtacgccgggcttactgggttgtggatgattatagattgcccctgtgcaaattcatggattaagggagatcttggatgatttcatggaaaggatatttaaaaaaaggacattggatgtctatgactgaatacgacgctttaaaatgctacataatggctgaaaggaacaatgtacaaatgttatcacagctgaatcaaatccacctccgagaaatctggaggactgcgactgaagatcgtccgacatttgccgtctagcgcctggtactcattgctgatccatatatgtttgctaaaccgttgtgttcggtacacttcgtcatcactcacacccagatcatcacgcggaatccagatgacaggccgcttggcgcgaagggcctcgtgctggaaggcacgttgcaccagctggtcacgctcatcgggcgtaagatcctctaattcgtcgtgaataccggcaaagagggcttggccgactgtgctgggggctggtgcctgggcctcggtgtcttgggccatcttttcccgcatatcacgtagtgttggtgtggaggttgctgagttctgaccgaaaaatttagatttccggtttgatgagctggaggcccatgatggacgtttgtctccaagcttgggtgctgacaagatatccgagttttgtcgcatctggtttgggaaattggtctccagaggtttcagctcgatgtcttcttgcatctcctttatctcctttccgtgccggcgctcttcttgttcacgcttggcgagggagccttcgatatcaccatcctcgtcatcgtcatcgtcaagagcgagaccgaggcgagcgtgctgagcacgacgaaactcttcatcacgtcgaacagcatcatcttccaaggtaacgggcagataccggatcagtggattgaacgcatcgttgagaagaatttggtaaccggccgtcaaaactagaacaacaatcatgcaaatagcctgtcccttgcaggcgacatcgtcatccgcgttccgaaccaagaagaacaagccgattaggcagacttccataacgtagattcccgtgaatagctgattaatagctcgaggaaaaagaaggccaccggtgtcaaatcgaaacttagtcacatagagtgtgttgtagcgatagacgaaccagaaaaggccgaaggtgaggatgttgaaaattagaatcagaggtgcgatcacacagtagatcaaaccttggagaatgttaatcaacggattgtatcaaaaaagacaagacgacttaccaatagaggctagggtggtatagacagggaagaatgtaccccattgcatctgattgaggtttgttgttcgtgcccacttcttccgggcagtagagtccaaaattggagctagaatgaaccagctcaccaggccaaagatttgtacaagggcgccagcgctcacagacatggcttgtagaatcatgtaagagaagaagtagttactagacttcgggatgttcactgctaggagttgtggccagctggttacatcagtgacattctcaatgatcgtcgagaaactggaagcgatggtgacaaccaagaacaattgcacaaagaggaatgcaaaataatagttctggacagtgagctcgatggacatgccggtgaagaggccttgcgtgcggctcaaaaagcgaaggatgagagggagcagcgccatcagaatagctaaacacagcgcaggaagaataccctggatggcagaaatgaaccagtctggaagcttgccaagccaggcaagccatggaaatgcaccctccagatatgccaattgtgatagtagtccggtgaaggcgacggggaacgcccatccaacgaccattgcgcaaactagtgtgatgatgccgaaggaacgcaggtaccgttcccaccacttgatcgacatattatcccaaatcacatcatcgggagatatttccacgactcggggtgccatctgcttggggagatggtgactgacagcttgacaggccatgtgggcagcgacttggtgattgaactggatgaaggccgagttcattaaagggaacccctcggggtgctgctgatcgacttcgatctccagattcagacgagcgagctcctttcgacaataatcgatggtgtcaaccttttcccctagaagccagatcgaaggcatccaactccagccaaatatgggtagacgcatggtatctcggtccttcggccggatgtattctttccacagcggctctccgtagtcttcattttcgaaattttcgttataggcgatagggtatctttccccttctatttcgtctccctcctttcgagcatgctcgtgtttttcgttctcggatttctcgaagtcacgataggtggcatgagttgcaggcgtttcgggtgcagtcagtggatattggtcagcctcgcgtacaccctgcgatcttgtattagatgacattcgtctccagaatggtggcttcggcggatcgctgcacatggtggcatcctggtctgtattctgtcctggatccggtcctatgggcttccctaagttcaaactcaagtgctgacttcgccggagccccacgggtttggcgggttttgtatcagattggctgccagaggcaagaagacctgggactggaggggtgtttgcacgaggcggaagggtgtctggtgttgcagaatgaccgggacctgagggggtatttgaacgaggcggaatgatgttatctgtagttgcaacgaagcccccagttcgagataacggtttcttgaagcctccaagcactgttttgcccagtttccctaccccttggccaaccgccccggcggcggcaagggcagggtcaaacattcgaggtccgtcctccgaccgtttctcttggggttttctgtggagcatttcttgtactgtatgggcctgatgaggattaccagagctgataccaggacccatagccatttgagatgcccgtttttcagccgtcttttgctcttttttctctgcacttgattgactctcgccggccttctttgcctccgccttggcctttttgagctgtgcctttttgcattttgcaatcaattctgtctcggcgctttcaagcttgagagcaagatggtttcgtgctttcactttctcgttcaagtcgtcgaagttgcggttgagccaaatgtttcgcacacctccagggaaaacatcgaaaagcctgtcaagggcatccatggtgagccaatcaggtggaatagaagtaacgagcacagtggtagcagaagcacggagtcgatgctggggagacgtcaagtaggcctgtcgcaggcgaatgtaattccgaagttcatcaaaaaacacagcacagacatagataatggcaatcacggccattaccaaatgagcccaataccgactcgtgtgctcaggggttacgttaccccatgccaactggtccagaccagtgacggaatatctagtgcctgaggtaccattttcgtatgtctggcccttgccaccagcacggtttattggaagtagaacaggtaatatcacgaggcccagaggaaggaagatcttcaaaagcatgcgcagatagcgcaggaagaagtatgcatcaagcccacatttctggatgaattccgagctggatgtacgaaagactgggacaatccaatggaagaggcctggcggagatggggttgtgcgttctctatctggtaccagataggttcgcggttgactggatatcaatttcggtcagtccaacgtccacgttctcctttccagtggggtttcaggggacttactatatacggcttagtttaccttttagtaacagaaagaggagaaattcaacgacgaaaacgacaatggccgtcgccagcgacgccaggaaggtcgagattgacacaccttcggcggttcggccgtggccgccagtgtgttccagcgcctcctccaagcccgaagtcatgacgatcagctcgggtattgccgagggaaatggggactaggacgctaataggggtatcgaagaagatgtcacggcaagaagcatcacgatatgtcgttgtatgcactgatggatgtcgaaagtaatcgcctgtagattgaggggttgaataagaaggagctctctgataagagaagaaaaatcacaaagagaaacccacttgcgcagacctagggcgccaacctgatcagctgtgggggacgagagccaataacgtcgaatttggtctttgagtaatatcttggtttatgaggtgagtggcgcgaggactgagctggcggtatgatatcaagaaattaagacgttgacgaacagggatgattggagggatcgtgggagcgccgatcgaggatacaatgacatcaggcgctaagtgaaacagcccaaagaagtcacggcagctttagatagattctagtggaaggagaacaaagattgctttgtgtaaccgagcgcctcggaatttgatctatatttataacaaggaatagctccttttttcccaactatgacaacgttgatactgaataacattgcgagacccctactacggtagtattgaagcttttagtggggagaaaaaaagggaaagagcggtgattggcccctgagtcgaaggtccactgatgtggcagtgcatttatgtaattcgcaaagtccaccagccacagggtcaggaactccacgtggctggcgggcaaannnnnnnnnnnnnnnnnnnnnnnnnnnnnnnnnnnnnnnnnnnnnnnnnnnnnnnnnnnnnnnnnnnnnnnnnnnnnnnnnnnnnnnnnnnnnnnnnnnnnnnnnnnnnnnnnnnnnnnnnnnnnnnnnnnnnnnnnnnnnnnnnnnnnnnnnnnnnnnnnnnnnnnnnnnnnnnnnnnnnnnnnnnnnnnnnnnnnnnnnnnnnnnnnnnnnnnnnnnnnnnnnnnnnnnnnnnnnnnnnnnnnnnnnnnnnnnnnnnnnnnnnnnnnnnnnnnnnnnnnnnnnnnnnnnnnnnnnnnnnnnnnnnnnnnnnnnnnnnnnnnnnnnnnnnnccccggccacagggtcaggaactccatgtggctggcgttcaaacacgtcggccgaaaggggaaaccacttaacgcgtcggtcgcgtccacggtggcagaaaccgcgttccgcccacagctttttgctctccctttcttcacttgtatcccatagaccaccaacccacctgatcatcgtctggtatcagcacaataattcatatccaccatgtcgtcaccaacacaaagacggagtggtcgctcctctaaaaattcaacttcatcgcctagttcttcgtcccgacaggagcctcctagcagtccgacttttcaagcaaccccccgtgcctcgagacgtccattggctgggggagccgcaccctcttcgtcccccatttttttccaatcatccccgacgaagggaaataacaatgccgagactccagatgaacgcatggccgatgccagctcaacggtagacgatggcgacagaaccccgcggggcaaccccggtgtgagaggtacgaatttggttgtatcagagcagcaccttttgttttcttttccaatattgatccctaaccgcctattagattcttctcctattcattatattccaagttctagcccaactcgaggcttcggtcgatctgatatccgatccgacatccgctccgatgcattgagcagcgccagcagcggattatttgtgtcaccgggaggccagggccgacggggaggtcctcgtcgcagcgatttgcattctgggggctttgggtctacttccggtcgccgtaaccgtgtgttcgttgacgccaatggaatgcccacaggtgatacaatgcctcgctctgatgccactttctcgaatatcaaccctggcacctctgaagctgaagccatcgccggaaattccactcgtgtgatctggggcaccaatatctcgatcatagattcaatgtcggcgttcaagaacttcctgtataatttcgccacaaaataccgcctctgggctgacggtgccaccgaggacgaaaccagactactgggagaattagcggaaagacatgagtgcatcaccatgtgtaacaacatgcgacgactcggtgtgaacacattcaatctcgatgctgctaatttgaagtcatacccattaacccgcaagttgtggcaccaactttccgcatatccgcaagaaatcatccctcttatggatcaagctttgaaggatgtcatggtcgatcttgccctcaaggaaatggacgttcttcggtcagagagccaacgcgctgctcagcctcgtgaccgacgtggtcagcccatcctcacttcggacaatgcgattccgactgtcgatgtgccggatttagttggtgaagtggaggcgatgaccttcaaggttctccccttcggtttggatcaaaccgtgaacatgcgtgatctcgacccagccgatatggacaaactgatcagcatcaagggcttggtcattcgtgctactcccatcatccccgatatgagagaagcgttcttccggtgcagcgcttgcagctatggtgtgcaggtcgacattgatcgtggcagaatcgccgagccaacggtctgccctcgagacggttgcaaagaaaagaactcaatgcagctccttcacaaccgttgcaccttcggtgacaagcaagtcatcaagctccaggaaaccccagacaacattcctgacggtcagactcctcactcggtgtctttgtgtgtctatgatgagctagttgatgtttgcaaggccggtgaccgtgtggaggtgaccggtattttccggtgcagtcccatgcgtgtcagtgctcgtcagcgctcgcagaagtcactcttcaagacgtacatcgatgttcttcatgtgcagaaatttgaccgtaagaagatgggcattgacatgtccacagtcgggcaagaaatgtctgagcaggcggcagaggcagatcaggcgcgcaaaatttcagccgaagaagaagagaagatcaagcggaccgcctctcgtcccgacatctacgacctattgtctcgttccctggctcccagcatctacgagatggacgatgtgaagaagggcatcttgctacagatgtttggaggcactaacaagaccttccacaagggaggtaatccacgctaccgtggtgacatcaacgttcttctgtgtggtgacccctcgacctccaagtctcaactactgcgctatgttcacaaaatcgctccgcgcggtgtctataccagtggtaagggttcgtcagctgttggtttaactgcctacgtgacccgcgacccggacactcgccagatggttcttgaatccggtgccttggttctgtccgatggtggtgtttgctgtattgatgagttcgacaagatgaacgattctacacgatctgtccttcacgaagtcatggaacagcagaccatctctatcgctaaggcgggtattattactacgctgaacgcccgaacatccatcctggcctctgccaaccccatcggcagtaggtacaattctaaactgtctgttccgcagaacattgatctgccacctactctgctctctcgtttcgacctggtatacctggtccttgaccgtgttgacgagacggaagatcgtcgcctggccaagcatttggtcggcatgtatctagaggataaccccgagaatgccagctcacaggagattctggtaagtgccatttccccggatgatcaattcgcgagatttctaaccgttctctctagcctatcgaattccttacagcctacattacatacgccaagaccaattgccaccctgtgatcacccccgctgccggtgctgcactcaccgaggcctacgtggctatgcgccagctaggtgatgacatccgcgcccaagagcgccgtatcactgccaccactcgacagctggagtcgatgatccgactttccgaggcgcacgcacgcatgcgtctgtcgcccgaagtcaccgtcggcgatgttgaagaatccgtgcgtctcatccgctccgccatcaagcaggccgccaccgattcccgaaccggtctcatcgacatgggccttctgaccgaaggcagcagcgcctctgaccgtcgtcttcgcgacgacctgaagaaggcggtgctgtcccgccttgatgaacgtggcggtgtgagtggtggtgcggtccgctggaccgacctgtatcgcgatgtgagcgagcagagcgacctcagactcgaccacaaccagttcggtgatgcgctgcgctcactggaggcggagggctccgtgaatattttcggtgaaggtgctcgtcgcagtatccgccgggcggccatgagcatgtcctaggtggctgcgatgataccatgatgtgatgatagattaggctgcatgtcgtccttgagggtgttctggtgttggtgtttcaatgggtaatgatataggattcggccccggaactgttgtatatggtagattgatcaataataatatttttccaatctcatgagttccccaaggttggctttgctagagaccaagacatgtggaaaggtgagaaatcacatgcatctggctagacccaacaagcacaaagcgggtgtggggctcgatcatcttgcagatggccctgtccatctgcaacgagcattgaaaaagaaattgaaaagcacgtttaatattggactgtgtaggttctagttctatagattgtgtgtgatataataacagggccttggaatggccctagacaatagaacaatcctgcgcagtgagagatcaagagaggtcaacagagagaaagacgaggaagacaccacgtgcgcccatgactggccggattgttcacgtcaccaaggggggtctgtattgcggatacagcgttaccataccataattaccagaagtacatctcgattgccacgatcgtgctctttataaccaccagtatagcaagttgatgcttattttaaactcactacggttaaataggatactccaatgccattcagctattcaccatgttgagctccgtttaaacgattgataccatattctatcgcctcgactattaccacacccacttggccacgatggggccgtcacccgctagtcatcggactagccgagttcgggggtccattataacctcttttgactttctgtcttcggataagctgaactctccgaatttggcctctccctgcctccctcacaccttttttctttcttctttctccttctctttcttcttcccgtcatgagcttgggataaacctagactccctcacatttctccttgcccaccatgaggtatcgaattccctgtctcgctgtcttccagccaattccactccccgcgcatttatactgactcaattgtctcataggttcggcgaatacctccgttcttccatgataaaggaattctatccttactacattgcctatgacgatctcaagaaagctctgaagaccgatttcgtcgacgagccaacgtccgataacaccaagcccgcccgcaaagaatggaccgaggacgatgagacaaactttgtttccttgctcgagagtgaactagagaaggttttcttgttccagaagcgcaagagcgaggagattgttgcccgcattcaagaaagcgagctcgcggtgaacgatgtcgtctcccgtttggacagctcggccgattcccgtcgccagagtattcgagcttctcgccccgcgcccaccgatgcggatttcttgatgcttgagcaggtactcagtgatatcattgcggatgttcatgacttggccaaatttactcaattgaactacacgggtttccagaagatcatcaagaagcatgacgtaggttttccttccaggtcgcccctatcaattcgctaacaattgcacagaaagaaacacaatggtacctcaagccagtttttgcgacacgtctcaaggccaagcctttcttcaaggacaactacgacgccttcgtgattaaactatccaagctgtatgacctcgtccggaccaagggtaacccggtcaaaggtgattcgtctgctggtggtactcaacagaactttgtgcgtcagaccaccaagtattgggtgcaccgggataatattacggagttgaagctggtgatcttgaagcacctgccggtgttagtcttcaatgccagcaaggagttcgaggagaaggacacggccatctcctctatctactttgacaacacggacacttgggaactgtaccagggtcgtctgaagaaaacagaaggcgctgaggcaattcgactgcgttggtacggtgggatggaaagtgaccagattttcgtggagcgaaaaacccatcgcgaggactggacgggagaaaaatccgtcaaggcgcgcttcgtactcaaggagaagtacgtcaatgcctatctcgacggccggatgacggttgagcggatcttcgacaagatgcgcagggagggtaagaagagcgcgtcggagattgatgatttggagcaactagctcgcgagattcagtaccgcgtcattacccgccgcttggtgcctgtcacccgtacattttatcaccgtactgcattccagctgccaggtgatgcccgtgttcggatctctctcgacacggaactgaccatgatccgagaggataatatggacggccgtcaacggtctgggaagaactggcgccgtatggatatcggagtcgacttcccattctcccagctgcctcctgaggatatcgaccggttcccctatgccgtactagaggtgaaactgcaaacccaggcaggccaggaacctccccagtggattcgggatttgactgctagtcacttggttgaggcagtcccgaaattcagcaagttcatccacggaacagcgaccatgttccctactcgtatccacctacttccattctggttcccacaaatggatgtagatatccgcaagcctgcgactcgtcaattcggtatccacagaccgctggcgagtacctcaatatctgccaatgatgaagattcggatgatgacgaaacgccgagtgcgcaagagacgcccccgaacgaacacgccaccgagcatcaaaacggattgtttgagaccaatggcaacgaactagatatcgaagaacgtatcgccgctcagcccttgcccggtgacgaagactacccattgtacgactcggatgacgaatctgtatactccgatgaactcgaagaagctcgtcgtgtaggaggggcgtactacgcgcagaaattggccaaacattatctctctcgggctggtcacgctgtcgcacagggtcttatggcgttaatcccccgcccccgtccaacatccctgcctccccccgaacagcgtggcatcgctgtcttgagtaaccaccgacgcaccctacagcgattccaggctcccccgggtaaacgtaagtcggctcaatgcatcttgtgcatcaattccccagactaacacacttcgcaaaaaattaggcatcttcgttcccatccgcgtggaaccaaaggtctacttcgctgccgagcgaaccttcctctcctggttagaattttccatcatcctcggtggtatcgccgcaaccctcctgaacttcggcaccgatttcgcgaccctcatctcctcctgggcgttcaccatcctcgctgcgggtgccctcatctacagtcttttcctgtacatctggcgcgtcgacaagatccgcaagcgccgtgacgtcaaacgcgtctactatgagcgctggggtccgacagtcgtcagcatcggactggtcgtaatcattttagttaactttgcgctgcgcgtgcgggaaggcgggtttatggctgcgccgggatcggaaggcgagcctcagcacggcgggcatggggaactgtagaactcttggtttgtttggaaaagaagaacttaatcgttctctttgttttattgggttgaccaccttctttactgctcattggctaggcgcctcttacgtttgtatctactggtggcttcgggctggggcgttgggagattgtaaatcatgtacaaatcgcatacataccattgcaaatagtgtgagaatggcactcgattaccgatttctttgctttcgttttgtagatgttgtaaagtacaaattccagggcctgtatctcataagcgagtgacaacccagaacgcgtccatgaatcagcaatattactaaggataggatatatcatcttcacaataagctgtaggctgagaaggtgagttcagaaagacatcttcgaacaggttcccgaatggaaacgagaaaggaaacgccatgcccatgccgtcttgcgcaacttgatcaaataagcctgcagtggggttgatactaccagggttgctttcgttatcaagttgactcgcaccatttcccatcgaggatcctgttgctgaatgctctgctacccttgcgccatcttgtgtctgcccacctgcagagtgtcgcctaagcagggattcgtaaattggatagaaggctgcaagtaccgggaaccgatcttgcaacttgtcaagtatcagcatgcataactgggcgcgatggtgtgaaatccatcggacaccagtatcccctctgtgtatgttgacaatatagattgagagcacagacagcacgggtgcaactctgcaaaggctttagcaaaaccgccccggatcgattgggggtactttattatggaggcgacgtacatgctagctgcggctgcatagagaagatcacttgccatgagtatttctagcatgttgtagatctccgcacatatctcgaatgtcggagtgcctggtccggtattgagagaaaaccttgggttgctccgatgcaaaagtagccggtattccctatagattcagaatcagaatggagatattttgaagagccatttgaaagtcaacttactggtataatatatgagtcaatatagcccacttgctgctacttggcgacaacgacttgaattccggggaaagggatgaagagcacaacgagatttgctctaaacagatatcttgtgaatggccactatcttcgtcaaatttgatagtgaagaagcgatccactgtaatatatattagcaaggaaatacattcaggaatatgatatgatgatggatgttgaacctgtccgagctagttgcacagcatttatcacaaaggtatttgcctcatcggggtatcccacttgagacccactggcttggtcaaaatctgcttccgacagaggggggacattgcaaagtcttccttgcacgtgtgggggacgatcgagaagcatagacagatttatgtccatggcctagtttagaatgtcagaccgtgatagagctggggctttgttgagcaataaccgacatataccatccaccataatcttcgccataattttcgttctttctcttcgagacggttatatgactttctggaatactgatcagccgcccttggctcacattggaggggtaagtagactcacattcgatgcagtcctaaagcctgcgccattcccacagagataccaacccagtaccaagggtctttgtgttctagaagaccattccaccaatagcccataagaaatgttgattgaatcgtcgctatcgcatcggtttcatatccagcatcgtacagagatttggctctctggtaaaaagttaggcttgcagcgtatcgggacacaaatccggcaccagcaatgacggaatccgaacaatttatagtggcagcgaggtagatagcattcaagagcaagtgtgaagatttgccttcctcgagagtgacaagaaatcttgacttatcaagaataggtgcagcaagtgagaaatgaaagtaacaatcgagaagggcctggctcgtctcttgtgacggaagatcaaatgccccttggttcttgattcgctcaatagtagatatgtgaagcttttcgatttcttgcgtcgtcggcctgcccaaccgggccagcattgccccgtggaggtggtcctgaagtgggcgagcatccgtcgtacctacgaaaggatttccaaactgttggatcaaataattgagattggaagaatctccaacatatggagtttttccacttgggccttgggctgggaaacatggctcttgccgtggcttatctccatcatcttgagcatgagtggtcagaggagggttggaacttgtcagtccttcatacggcacattgcgggaggcctctgaaagatcactgcctaagtctgcttgagtggtcaggggaagaagctttcgtctcctgaatctgaattagtcctagtatgatggcttgggtcttgaatcctaccgtccacgacgagatataatcaactcacattggcgccgggcattccgacagttggaacacgcgacaccttcactgcggtcacatttgacccgccggtcatgacacagacgacaagcgattttgactggactgctgcgcggcatttgataattgtcaaaggcaattgtccgactctaaagttcggcgtcttgacttcggcgaagttggtgagcgcagacccacaaagtcgccgaatttgggcttatctgattggatgtctattgatatctaccctctcattgggtgctcaacaccaacagtttagaacgaagtataaaagttctccaaggaggggtttttactcaaaccagcaaattattcaagttgctgctgaagatgctttcgaatatatcctctcgaagcatgctccgtcgctccaatccgaaacaatggtcacagtgttgcttgcccaccgccgcaacgacacgatacctacgcacatcttcagaacctggtagctctacatctgcacccgtaccattcaaaagccagaaagatggagcgtccgggtatcttttgtaagtccgatactgaattgccaacttgcaacccgactgatttatagttctaacattttctacctagggcaaaggcagacgaattggttaactggggaagacaaggttccctttggcctttatcatttgggctggcctgctgtggaattgaaatgatgcatacctcgatgccacgttacgatcaggaccggctgggcattattttccgtgcctcgccacggcaggccgatgtcatgattgtggccggtacggtggtcaacaagatggctccggccgtgagacaactatatgatcagatgcccgagcctcggtgggtgattagcatgggcagttgcgccaacggcgggggatattaccactatagctacaatgttgtacgtggtgtggaccgcatcgtgcctgtggatatttatgtgcctggatgtccaccgactgctgaagcccttctgcagggtatttttcttctccagaagaagatgcggaggacgcaggtgacgaggatgtggtacaggcgctaagcgagggttgaatgagagtatatatatcctactactcctgacgccacggaagatatgcaacgcttcaaatgccaaaaaccgtgatattcattcttccacctcgaactgcatctctcgctctataatatagatccgtcagtatacacctagaacaaattctctacaaataacaacataccccagatcttggtcgcatgtgcaatgatcgtctcagccttgaccagcaatttcgcagcatacctctccgtctctgtcgggtagagttgacttttctgcgctttgcgaggattggcctaaacacatcaaggacacgtcagtagatgatcacacatatgtatagcccagcaatcctcttcaaggtatcccaaaaaagaccaaaaacccaccatcataagaacaggaaccaaatccttcggctcagcctccgccaaagctctcaaattcttaaatccattatccctgagcaaacgcgccgtccaactcttcacaaaagtaacctgggccatctcaagcagatccgcgcgcgcgccagcctcaagcctatcgcgcatatgatccaagacggctgccatcatgccccagttcatgcgctgacagaatttgaccatgccggcggcgaagccgtggcactgctgtgccaaggtttgaactgcaccgcggggggtgttgtagcgttgggctatcgttgatatggggacttcgttgctgagatcgcggagttgaagggctgtgtaggcgcggcagtagatgcgggcttgttttatctggactgcggtgttttctttcagggaggcgcctgattgggccctgggataagaatgttagtttggggttggtctggtctggtttgttttgagggtgggtgtagaattgtgtgcgatatgtgtaggagcaatggagtagcagagggaaggggaggcgtacattgtgttgacgaaacctggttggactccgactaattgtagagcccggagaccgctctcatctagcctgtctagctgatcgcggaagatttgccaatcaatgggggtgttcacggctgcttggagcggagtgaacatgtagaagatgtgcatgtcaccgtccatgacaaaggcctgtaatgctcgtttcagctcttcgtgaacgaacaggccgtcttcgggtgaaaatgccgaagccacgattgcttgtcctaatggtgtggcttcgtaggattcgtcgtttcgcaaaataagaaggtcttcgtcgactagttcctgaagagcggatttcatgatgctgtatgcgatcttcttgtccaacgtttggtagagaagcgtgcaccgaacatattccttgatcgcctcgcagccggacaccaaccccgttgccacggcttcgagtaaggcccttttggttgtgagcgaatgattcaggagcaataaatagagtagaacaagatacataccgcttgaggcctcttttctcaggtgccaggcagctctcaatagctggcatatcagcgtccaacagatcgcagacagcctgcatatcggctttcacgcagatgagataggtctcgccagcgttatccttgcctttgcggccagcacgaccgcacatttgacgactaattttgtcagcttatactccttactccaagaagaaggtacctacaacatagccggacctactaattgacgccccatgcgcgcaccattgatgataactcgtctcgccgggaggtttacaccagcggcaagactgcacgtggccacgaggactttgagcacaccctggtcataggcctgtgcaattagctcccgctcttcggtggtcatcccagcatctaagtggttattagtaagcgtggaaactggccccatggatggatatgtactaactgtgaaaccctgtccctctgattattgttgtctccaaagccgggtccagtccacaagcgaggctccgcaattctgcaagaaggtcgagtcgtttattcagctcttccggctccgccggcggcatcgcttcaccgatagtcgcagcgtgaatttggcatgcgttacggctgccacaaaagaccaatgacccaaacccagctgctgcagtttcgacagctagcgctaccatggcattagtggcagggttgctgagctgcttagaggtagaaggttcaattattcggtgtggaggaatggtatcgtgtagggacgcagctgcagtcagcttagatgccgtatggaacaattgccgcgaggttgcagctgggtagattccattctcgtataccaagtattcctcaataggaattggtttgtatgtggagatgtagaacttggcgttcatccattgtgccagcacttcggtgttctgtacacctgttagagcagcccaccgagggcttgaaccatagacttacagagagtgtagcactcatcccaacaatctgggtgtcctgctgtaataacagcagcttcgtgaccatcaattccaagagatagccccggtgttcgtcatcgagcatgtgtaactcgtcaagaaccacgactcccaggtctccaacgctacactcttcgatggtgttgtttatcaacgaattggcctaaggaaataaatatcagagctctgcaaacaacactgaatcttaatcgtgcacaccttctctatcgtacaaacggcaatatcagtatccgcccaagaggctgtcgtccgacttccgccaaagaagcccgtcactctgatattcttgtgcaatttgttccatcgcctgcaaggaaatttggagtcattttcatcatcatccgggatatttctttccacgtcttgcacaatgcgacgcatccacttgagcttctcctgaaccaaagcaacataaggcaaaaccaacagcgctttgcgccctgggttttcgataatgcgtttcaaaagcagaacatccgcaacaagagacttgccaccgcccgttggcgccgtgtaaaccaaatgacgttcaccggagagtaagcccctggccagcagacaagatgcctgccatgggtagatattcctaacaccgagagcggcaaaattcgccgtgagagcgggcggcagaccatactttgggttagacagagagagcagggggttctgactagaaggtggggcggtcggtgccacagcttttggaggatcatccgaggttggctccgcgcccgcgcccgcgccaagatgaatcttgctggcagtaaagcgatggacgggggcgattagcagatctcgggcagactgtagcggagctgattccaatatggtgtctgtattgccattttgacgagggaaagtagcttgttttacgactggaccgggcgggatgtcgagaacctgctctgtgggctctgtcgggggtcgtttctgtcctgccacgggcgctacatgatacgcttgtcgacgggcgagatcaatggatgtctggaatccgcgagactggacttgatgacccgttgtcgacatgcctgaaacacagatcgatccattcgtctggggaggggataaatccagttgtgtttaatcaaaattggccatctctctgactttgaaaggtttatgttttatttgatgttgtttgccatgtttttcacggtttgttgtttttccaaggttatctagtcggcttactattcgttgttgctgcctgaggcatggattatatcagcggttatgtcagagatcacgttatgtcatccactcagatccccccggggctgggccagtcaggtctagttaacttgatgttcttagacatcgatgatcgccgcgtttccaataatgtgcgcattacgggattattactcgtattgcatgcttccatgctcccatgctcccatgctctgcatgattgaactgtagttccaatatggccaccatggagtcccttgctcggggactacaccaaccttgtacgagatcgactgtggaggcttatgtggatgccgtcttcccagccctggagcccttgagccctgatgattgcccacaagtacgttgtagaaacgcacaatgaccaaaaacggatattcgtagccccatacgtgtcaatggatgcctgggaacgattggcgcaattatcgtgtgtcgtcggagccgagagggtcggctgacgatctggggccaacggtgatggatttgcctcaacgcggctagaagacatcgtggcatcctcggaacctgcaacatacaacatccacatacatatggaattgcatgcatgttgacttagccttgccagggggaaaaagaggaaagttccaaaattccagtgcccatcccaagatcaagtatattgtacagaatctgagacccgatcggggtggaggcgtcataacgactgtatcatgagtcgcgcgtaccacccacctatgcattaggattagcaggattagccaaattagcaagattgtgaagtttcagtattgtatgacgataacatggaattcactgaccatgcatggtgggaatgtgatatagatctcaatctgtatcctttatttctctgtttcccctggacaaagtcacaagaaacgtctcatggcaagcttgataccacgagcgaaccccctttcaagccaccgtacagatgatggctgtaatggtcgggatgggttggatctgttgttcggaggtctgatcgccgcatacaacatatatctcccagatacatctgacacctgatctcactccaaccctaacacctacacagctactccgtataaacagcacacaacacacatgttatattggcttaaattgtcccggtcccatgggtggatttcccaacggagtaggccggcacgttatacccaaagagttcagaccttcacggtcctcggctagttctcggcggcatcgatcgtcattggagagaagtttaaattacctatattatgattaccctgatactctgatacttagtcctgtgtctgtgtattcccaattcatcgtctatccgacaatcgcgcctcaggacccaccctatcctaatgtacacgaatttatagatgattcccccttttgcctctcccgagatgcgtagccaatcccggtgtgtttggtcgcacaagatcaggcgaacggggaaaaatcaccaaaatagccaacatggcaaataagaaaggtactggccatgtattcctggtaattttccaatatcagtccccagcgactctgtttctaggtagcagctcccactagacctccatataaaactattcacatcccctttgacgtgctgagtagacaccgttccgcataccagcattcctgtctagtgtacgtcggaccactgatcgaaatatccagtagatcgagcaagggaggtccaaatgaggttctggttccccagggcctgtccttggggatccgtcatattaacatattgggactaggggccaggttcgggatcctcgacactttttgcttttttccgttttccttctcttcttctcccccttccccattccccgttgggctatatcgtcttttttttgccgctaaatcacttttgacccgcttctcccgacccatccctccctccactctatctactcttctctctctactcttctctctcctcctctcgcctttcttctattctggtcttctattcttctattctcccctattcatctcattcgagttggccttttcgattcattttcggtaagctccctattcttccttgccattcgtctattagcttgaagaagtcccctatcaatgttgttcctttcactcttgatatcggaaacacccttcacccctgcagagaaagaagatctgacacggtccactctttgtctttcccacttcttttcgcttttcccctttgcaactcccttgtgaagttcttcgtctggaccggtgaatcccatatctgcccacttacccgtattttgagattttcgcccttcccactttcagcttgcattcttccattgagcgtgtcctcttcccgcgttttctaaagttccaaggcgacgggttcccactaatcacccgccacagcttcctctgggcttgatcttttcacttcttacatcttcttccccccattccatcttcatttgcccgtggatgactaaggacctcactcaatgaccactcccaactctccggaggcagtggccgattcggccaacggctccgccaccgcgtatggcacgcgatcgagaggtcgtaatgcccctcggccaaattacgccgaggaccgtgacctggatgcggacatcgatctctctgctccaaactccaagtccgccaaaagaaatagcggcgtggcactcaaccacattgtcaacggcgccaatcacgaggagaagacctcgtcggcgcaaccacgaaagagcctgaccaatggtcagagcgcaaatggatcggcaaaagatgccattcctggcacttcttcattttccgccagaccggatgatgtgaatggatctaatttgagaaaacgcaaacaacccgccagcacgccacattccacccccaactcgggtggtgccgtgaagaagatcttcaccacccctccaggcgattcggaagggggttatttcaccaacatgatgagtttcgaaaactctgggccctatttgcaggatggccaattaatagccgatgatggcaccacttttgccctcaatggttagcccctcacttccttcaaaagtgattgttccaagactaataatttttatagaccatgtttatttgatttgcgaacctccgggggagccatattatctagcgcgcatcatggaatttctgccatccaaaaccaagccgggtggcttcattgaggcaatgagagtcaactggtattaccgcccacgggatatccagcgccattctcccgacactcgatttctctttgcttcaatgcactctgacacctgtcctctttcttcactacggggcaagtgtgatattcgacacgtgtcggagattgaagaccttagctgttacaagaagacgaggaactgtttctggtacgacaaaatgttcgaccgatatatccatcgtctttacgatgtcattccgactaaagatatcattaatgtcccgggaaacgtcaagaaagtgctcgacgaacgctggaaattcattctggtcgagatcggaaaggggaaagaattgacgggtgccgtcaagacttgcaagcgatgccatttatacgccgcaacctctgaatcagttgactgtgcagtttgcaattcaacatatcacatgcattgtgtccgacccgccttgacaaagaaacccgctcgaggctttgcttgggcttgtgccgcttgcagtcgcgcccaggagcgcaaactcgaggcacgcaacacaccattaactggcggcatccgaacagatggcgaagatgtgatcatggaagaagaggaggaagaggatcccaataatgtggcgaatggcatagccaacggtacctccgccagtacccccgcagccgaggaagattccatgcctcaacccgcaactgcggaacagatcgcacaagccaaaatgtggccttaccgatacctgggtattcactgccgcgtggaggatgctctggattacgatgatcgaatttacccccgagccagctcccgtctaggaactcggcaccaggcagtggtccccgcttggccaggccgtccagttgagtacgtgaaaccccttgagacgaaaaagaaatcaaaggttcccggcaaaaaggatggaaagctctctaaggatgcacaggcagcaatggaagctgcgaagcacgagagggcaaaccgaccgaagtgggttcaagatgagccagtgggctatgtgcatcgtggtcaggatgagccgatcataatcaatggaaaacagacgcgcacagccgagcttcaattcaaaatgcccagttctgatcagatcaccgcccgcggcgaagatgacgcacctggctcccatttaagcgatgcagatcgagaaaagttcgtcgacgactacatgcgccaagccaaggaactagcccctggtattggggttgagaaatacagcacaaatttcctcgacagagcccttgcacttctctactctgagaacttcgatgtccaggctgcccttgctaagctgaagaaaaccaacaagtacaaggatcttaaggagccccacatacgaccggaggaactcaagctattcgaacaaggtgtcgccaagtatggatccgaatggcgcaatatcatgaagcacgtcaagactgtccatatctatcagatcgtccgtttctactacatgtggaagaaaaccgccagcggtcggaagatttggggcagttatgaaggcagacgtggcaagaaggaggtacgccgtcatagcgtagtttcatctaaactccttgacgacgtggccgatgatcaggatgattccgcctttgactccgagaaagccattgtccagaagcgtggattccattgcaagttctgctctattcgccattcgcgacagtggcgccgtgcgcccctagttccccccggcaccgtggttccgtccgagccctcaaacaagaaagacaagggccctatgctcaccgttgcgctctgtcttcgctgcgccctcctatggcggaagtacgggattcaatatgaggatgttgacgaggttgcaaagaggattgcaggcagcggtaacaagtcatggcgacgccgaatcgacgaagaaatgcttgcgcaactgattgtagctaccgaaactccgtttgtcatcacccctgctacggcaactacggctactgcgatgggcattccgcttgatacaaaccctcgactcttgatggaaggaaagccggaaggaaaggtggaaggaaaggtggaaccgacgaaaaagaaggccaaggaaacgcccgctccttcaactgcgacatccgttgaacctatgccaaagaggaagacgatcccggagaaagtggtggaagctccaccgattgttcccgacccgccaaaggccaagaccctcccttgttcaatctgcaaccaaatagaaccttcaggtgaagagcacctttcatgtcgggattgccgtcttacggtccatcgcaattgctatggtgtgcgggattcgcgccccagcagcaagtggctgtgtgatatgtgctccaacgaccgcactccctcgatttctacagactacacatgtgttctttgcccagtgtcatggaccgaacacgacctcatggagacgcctaagaacaactcccggaagaagactgagcgtgacaaggaaaaggagcggatggagaaggagatggttgcggaggcgattaagctttatcgccagcgtcaggaggccgttgggaagcctatcggtccccgggaacccctgaagcgtactgcaggcaacaactgggcccacgtgctttgcaccttgtggaccccggagttgaagtatggcgatgcagaggagcttgagcctgcggaaggattcggatctattcccaaggagcggtggcgcgagacgtgtaaggtttgcaagtcaaataagggtgcatgtgtaccatgtagctttgctggctgcaatgctcacttccacgtgggctgtgctttccaagcacgctaccggttcggcttcgatatcacacccgtcaagagctcacgccgcgacagcatgcgagctattcgtctcggcgaagatattggagcagcgacacctgctgtttactgtccaaatcaccatgtgtccactgttctgcacgaaatcggtgagcagacaaaccagcatcatctaaacgctctccaattgttcgcccagacctacaagcaggccgacctcaccctcactggaaccgttcgcaaagcggcgtacatgcatcaatccgtcggagctccgccacacccttccaccaatgtcaaccgccgggcttcaacgagtactacgccggcttccagggatacccacaaagttcagccggtggaggatgtggctggagatcccatggatattgataccgacaaccatgttgcatcgcgaccggttgctcctggcgtggagaccaaccgcaaatgcgttcgttgtgccaccggctttagtcctaggtggtgggctattgggcgacgacctcctatggccaatggctctggacaccctcatcatccgccccaaggtcccttcccccaacaaaatggagatccttgcgaaatggcatacgaatgtcataaatgccatttgaagaatccggcgcctcctccccctccgcctgtaccagagcccacgcccgaccaacggccttcgccttactctgctcaacgccccatgatacccacctcacgaatgcctggccatccaggtcatccaggtcatccaggccatacatttttgccacacccacatccacacccgcacccgcatcccccccctaacggtgtgcttgggcggccgatgcctcctgctcacccatccaacggacttcccggaccaggatacactggaccatacgagcagcgtcacacgcccgatatcggtattcgcaacggcatgtcgccgtctccttatcccccggcacagccacctccccatcacatgaataactacccgccaccccatcctgcagggccattacctcaacactataccagtgctgggccttcgggacctccgccaccatattccacccaccagagcccgtatggccctgtgccggctcgctcgccgcatctttcgcagccaccgccgcgatcatatgcagcgtccgcatcccctccaatcgtgcaagcgacgacgatcaaccgatcaccccagacctcgctgagcgctctcaacggcggtccccctcctcgcatgtactccgttgagcgtgtggtaggagccccctctcactcaccaccggtgacgcaggcacgcattgacccgcgggggcccaccgccactcctcccactcgaccggaagatacaccaccttccctgatgggcgggccaccaagcagtcggcactctggggtcaacggtacagcgcccgggaccggagcgagcgcaagcccatcgctgaagaaccttctctcataacgatatccccctacacgagtgctcctaatcgagttgtatgatagtgacctttcctatttgcttttaccgctactgcatatgcatgccacggcatcacatgaacaaaagtgtgtccgcggttggattctcctttctgtgttttctctttgtttttctttcctttccagctacggagaccccgagcctttctagccggtagatccacctatcggccaccatctttcaccctttatcgtttcttcttttcttatgtgcttgttgtttttcggcgtcttgaattacggcacctgggaaaagtccgtggagtctgttaaggagcggttggggggcttgatgtcgtcgaaaatcacggattgcatggagtaggattggccactttatgattgatatcaccattacccatttttccagctagatgaattgttcaatattgctatgatctacattttctgattcttcaacaatcgtacattatccacttaggtgtccggcatattataaaccaacctcggaagctggcgatgctgacaaatgccgatcaaatgcggtcagttcgtcatagctgttccaaggttggcttcaggggatataaaatagatcttctgcagatatttgcatgaaaaacacccattgaacacttttaagcatcacccaaaatgagcgacaccatgcgagccatcggtaagtgagcgcggggttgaagaacatttccccacctgatatcatctacacttttggaatggaggatcatacatcaacccatctgcttcacttcattactattcactctctttcctctatacccacacctcgaatactttaatactctatacaatgtcaaccccaagactaacaaaccctaggcatcaagggcggcaaaggccccgcaacaagcctctttgtcgaccagatcgccaagcccaccgccgcagaaggcgaagtcatcatcaagatccgggccttcggactgaaccgcatggacctgcttcagcgcgagggcctataccccgtcccaccccaagcacccccaaccatgggcgtggagttttccggcgtgatcgagagcttcgggccggacggacacgaagacttcaaaatcggagatgaagtattcgggcttgcatacggcggcgcctacgccgagtacatctccgtctccgctcacatgctagtgcacaaacccaaagagctatcatgggaagaagcagcaggagtcccagaggtgcgtacacccaattcaatcatctaaaagaaaaacccgctaaccaccacccgtagacctggatgacagcctcgcaagctctcttcctaatcggcgaattccaagcaggccaaagcgtcctctggcacgcaggcgcatcttccgtgtcaatctccggtatccagctcgcgaaagacgccggtgcaaaagccatctacgcaacggcgggctcgcaagagaaaatcgacttcctagaaaaagaactcggtgtaacgaaagccttcaactacaaaacccaagattgggcggcggaaatccagtccgcgacatctggcgcgggcgtcaatctcaccatcgacttcatcggcgcgacgtatttccagggtaatttggacgtggcggcgcgcgacagtcgtattgtcttgctgggccttatgggcggtggcaagttgcctgacggggtgaatattgcgccgttgctgtataagcgtgtgcggattgagggcagcacgctgcgcagtcgggatctcgagtaccagcgcaaattgcgggatacgcttgttgagcacgcgttgccgcggttctgtgatgggacgtttaaagtatttgtggagaaggtgtttccatttgagggcattgaggaggcgcataagttacttgagagtaacactactaaggggaagattatttgtgtttttgagtagattgcataacatcgaatatagagaatgtggaaatattatgtacggagtacaatatgtagataagctaatactaggcatagccaagagatcgacaaagtagaccccacccttgccatttacaaaaaaaaaagaaaagaacacatacggagtatacgcagtagtacatagctgtataatttgccaagtattgtaacataaactacatacatatatatgtaactagaacatatagcagttctaaaagtacctgggcatgcatgcagctatccctcgtgccgttgattggccgggttccccttccaatcacatggaagctatcagcaactgaaccgtggatgacatggagattagctaaggccacatagccacctgggcatattagcctaggactgtccattttatgtatgacgtgtatatatttgcatacattcaatattcttcttaatatagataatcaatgccctagcctgtgtcaagttaaaggtgaatgcatgcaattgtacctcctgcaggtgatccatttctgaaagtggagaacaatcgatgagatcacctcggattatctaatattccgtccgatttggccccgaatgggcccatcttatccacttttttcttttctttttctttttcttctgcttttttctttttttttcgattctgcagggtatgtgtattaatatctagtatgtacaatagggtattccaatgtagtatacaatacttgatgtattgtagctaaatcaatgaatacaaaattactacaactacctacatatatgtaaagtaatatatgcagtgagataacagaagttcgagataactatgtcgactgcatacatagctacccgaccgccctgtattgtgttacagaatctgtgcttactaacccacagaccttctagaaagaaggaaaaaagaagagaggcgtcattgggcccactggttacgatcggaggctctgcccaagaagcaatggtatagaggaagagacgaagacatagttgagagatgagtattctgctgataatcgagtaattagcgacaagtcaacatccctcaagatactcaccaaaattcaaatatacctgctagtgtacccaagaccaagattacttgaggatcatcccgtcccgccccaaggccttctggaaggaggaaagaagccccttccccgtgttcgcccctccacttgtcctcagctttgggtgtttttgctctttttaccaacttctttatttcacttcccttttcatcttttctttgtttatctcaccgctacacgctacacgcatacaccacaccatgtcgaattgacgtcctttcccgcctctcccttttgtgttctttcaccaattgaacccccttcgtcctcgacaaactcacgtgtcgctctcatcccatcgctcgtccgaatccgactccggggtagaaaaagtgggttgcgcgctcgatctgtctagtgcgacaagtctaggacaagtctaggctctgggggttgtctcggatcctccagtccataacgcgactcggactgcctcgctgcaggagacaactccattgttcgattcggtgacctgagagcgtgcttgccgactcctgccattccttccccgactttctttgtgccgattcaatcggatctttcccgacctcccatcaccctcattccagccgctcgtttttttcttttcccttttcacctctcataaccgtgctcgtcactcgtaccttctaccattcccctggtcttcgtcatcagagccatatgcgagccaggaccgctccgaccgactcctttcctttttcttcactccgattgagttcttgtcggtcttctgattccagcaagccctgatcgggggtcgttctcaaccttctaacatcatggtggaccgcgtggattgcgcgggcctgtacattgacgaccgagtgcggtcggagagatgggtgcgcaggaattccatcgatacttcaaccatctcgtgcgcgggttccttcgcgacacccgaagaaccggaggccctgcaagccgatgtggagcagctgttgttggtgtgcaaacaaggtaggttctacagacttgcattgcgttcgatgatttgctaattactcccgggttttgcagtctatctctgccacaacggctcctcctttgcgacgaaactggccgagctcagcgaccgggcgggtagcgaatgcaacccgattttcgcattcttcgaggttgacttcagcggcgaagagtcgaacttggctcgtcgaaaagccagtcgcgcttcatgggccgacaatgctcctccttcgccgggctccatccaccgcactttcacgttttcaacgcagtccgacgaagcacgggggctgtcccttctgtccggtgtctcaaacgatattcaagcccaagaagggccaaatttggtcatccccattgctattttgcgccttcctactcccgatgcccctaaccatgcgtctgtcggccctaccagtcaaccggattctcaaggacctcttacggtggagcacaagcaaattgcccgctgtcttgatgccggtgctatggatgtcttgaccaccccgctagatcggtcgcggatccaagggcttgtggttcatgcctaccgcacccgtaaagcggctcagagagagatgtcccggttcctcgcacggagaaagcaacgaaagctttcttgggtcggcgtgcatgatgagcagccatattcttatctacgagaagccatggtttcaaagctcatgaaagggatttgcaacccagaagaagtcatacatgatgaattccaagagctggatctcaacgttgatcccgcgcgtatcccttttgtcagaaaagaggtaggcagttggaatttctgcgctcacgagttcactgaggacgaactggtctttggcgcttgtgagatgatacaacatgctttcactatgccaggactggacccctggcgattgacccccgatgaactgcaaactttccttctcagctgccgcgccgcctataactccttcgtgctttaccacaatttccgccatgcgattgatgtactgcaatccgtcttttgcttcctgctccgcattggtgcattgcctccatatcaatcaattggtcaatctcctgtccccgaaactcccatcacctcccttctcacgccattcgacgcccttaccctccttatctcggccattggtcatgacgttggccacccaggcgtcaacaattttttcctcgtcaaactcaacgcacctcttgctcaactctacaatgacaattccgtcttggaagcgttccattgcgccgccttttcccagattttgcgtcggcactggcctgccgcattcaaggacaatcagctgcgaaagctccttatcagttctatcctggccacagatatgggtgtgcaccagaagttcatgcagcgaatgggctcattccaagaaaagttctacgaaaacaaccaatctgttgatggctggaagcctcaagatgtcgacatgtacaagactctcatttgtggattactgatcaaatgtgccgacatcagtaacgtggctcgaccgtggaaagttgcaatgaagtggacgcaaatcctgcaagaggaatttgccaaccagggcgagatggaaagggaggttggaatggaaaccgcactgtttggcgggccgcccgaattagggaacatctacaaactggctactggtcaaattggattcatgtcgatattcgccctgccactctttgaaggcatttccgaccttctgccccagttgcagttcgctacggaccatatccttcgcaatcaggcacggtggcaagaacttgctaacgaagagctgaagaagcaaggtcttccaattgagaaacgggccgaggtcactgtttcgcctcgctcccgtagccctgcagcttctgacaagcagctcttcaatccaggagatggcgcagcggatagagtcaaatatccagatgatggatacaacgaaaacaccattgaaccagttgtgtcgccagatacttcaggtcctcagatcgagattacaggaagtcccctggcgccggtggctgaattttcatcacggaaatcttctaatgccatcccggacctttcttgtttctccatcccaggagccccggagtctgcccatgggtccatctcgacacagcttcatagccctctcacagaagcaagccccgttaccgacgatcctgctattttagccgccgtcttgtatgccaactcggctctcggtaatgggaattcgccagtggggcgtggccatactttcggggctgccgagagaccaagcagctcccgccaaggtctttcacatggttctcaacgcgactccgaacgccaccatgcgcagcacagctcctctgcccgcacgggctctaatcgcaatagttgtacacggacgcaaagcacttacagcaacaccatgacacctatatctcccgcaactaatgcctcgagctttttagccgtggatagcggcgacgaaaagcgaggctccggggaaagtgccgcgccaagtgatattggaggacctgaggacaatagcacacgtcccagcacagcggacgtgtatccttcaggtttaacagcaggcggtttcagccccggtcgcgactctatcgctcgtagtcaagctcgatccgaagatggcaccagcaaagacttctccaggctgggagcccctgggacccgcagcacgactcattcaacgactactggcgaaagcatcaaaaatgaagctcctccagcggatgactctcatggtcatcatagacttcctaagcggaggagtcggcttcgacttgctttttggaagcgtcgtaaccattcgcacgaggtccccggtgagacatgaatcttgctgtcctggttggtgcttttaggcttgaacaacctctagctgtgtataatgctgccatggtcttatgaacatttcattctccaatgaggcttgagaccacactggtgttccatgaattcacgactcgaccagtcgaagaacccgatcaatgggttttcttttcccgccgcattggctctcctggtcacgactctacgaagtcgatcacgataccttcttaccttctgctggacgtccgaggttgtctcggacacgaaagcaaatgcaaagcttgtctgagcaattacagcatcaagacaagataagttgcatgttttactctactctcctccctcggggctgagagtcacgcttttatcatatagtcctctcaatggatactgggattggtgtcccgctacatctagcatctgattatttgcatcgggctcgcccacctacttctgtgtgatgaccacgaatgtctgttttctttcatccttaccttacaccttccttcatccctctttctttttcccttctactccaccattgtgtgatatttcggggcggttatttcttatcctagagttcggtgataggccggcgtttgatctcctactggggtttctttgactcgatattcgggatccttcgcgatcttggatagtctttttctctttctcccctgtgcttgatcctcttgtgtttcgttcttttctctcttctttttttttttttttacattgactcttgttagactcttccgctctgcgcgataatgaatgtgatgtgtatagtggcttgtaatgattgtaagatatgtagttatgttccaagtagtatatatgatccagcatttatgccaacatgatctaaaaatgaactccatgaagatagcaagtcaaaacaatacccaataccccctactgacaatcctcacaatccgccttacccttactcttttcctcctctttcacttccttctgctcaccctgctgcttctttaacgcccgatccgtgtgtcccaagtctctatcaggagcaataacatttcgcacaagtgacttgagcgctttgacttctgaggggaggaaggaatggtcaggacaaggctcccatgcagtaaataagaatgcatagaagaatatgcagtaataaatgacaaaaccaaaggaagaaaacataccaggaaaacccccatcccgcttccgatcccacaaaatgctctcctgcgtcgtgatctccccatcattcatggtaccatgccatatcgtcacagtgaacacgccgccggttttcggaacgagggcgacttcgccgaggtctgtgctgaatgttgagagaagttcttgggcgaactgttggtttcttatgttagtattggttccggtttagtgaggtctgtatattatgtccacggtcacggtcatggttatgttggcagtgacagtgacggtgatatcgagtctgatatatatggtatgcaatagcaaagtaacgaatcacacttcaccccgccgcagaaacgatacaaccaaatatctctaacatgataggtcaaataggaaagataacaacgtacgtatgcggcgcggagcatccaccggcactgtgtgcagaactggattgagatgcgggggagatggacgttggcgggtgcaattgtgtcgctcttattgggggttgagtctaacggggtcaatgcagattcggccatcatggactgttggtttgatgttggagaatgtattgggggcgtttgggtgattgtggtatggtcaagtcgatgtctcgggatggatggggatttggatgatgtcagcggggatgggctgacttgtgaatatcaaattacgaaggtgtatagtggccaacagtcggatgcctgattttaatggttttatcgcctaattgggactagctcttaccagttttagaccgcctttgacaccgctcaataccatcttttgtaagtacacatcgaagagacgaaactgttaccatggggtaattcaaatgccttctacctattttaattctcaaaactacattcaaatattcgccacgccggagccagaggatacggagagtttgaagtttatacggtcggtaggaatggggactttgtgttgaaatccaggcttggctttccaaccgttttgggccttggtgtcagttgcgctattagcttttctccgggaaagtgcgggactacggcgggtatgaatggctttaaatacaggagattcatatagttggagggccttaacgcctaggatcgatgagaaatagtattttggggggggggggggggggtatgcaaactttctttttccaatttttaaccnnnnnnnnnnnnnnnnnagatgggggggggggggggggggggggggggggggggtatgaatagcttcatgtttcaactttcaagctgttctcaatttggtactaggagatctgtcatagtaattcaggtattttaatttcctgccggtctaaaattggtaagagctagtcctaattaggctataaaaccattaaaatcaggcatccggctgttggccgctatacaccttcgtaatcaaatcctgtcttacaattgcatgttacatgtactagattggaataatgcctgattcatacgttgtataccaaattactttgcatgacttctcaattgccaatttaagctagacaaggccgaaacaaccgaggggctgaaccccgacgggtcatcccagccgcgattgccggaatttggaaccgaattggatgaaaatagcgcaatttcgattagatcggtatggtattggtcatgcgaatctatgatacatgaatggcaactctcacgccctgaatggaacatagaggctttttgaagatttgaagagaaaccgtaagaaaaggttacataggagaaaatgaaaaggaaaaaaggaaaagaaaagaaaaagagaagataatgccgattccaaacaaaaaagcaagaaggggtaatggtgaaattcaaagaagaaaaaaggcgcaacaaatgcatcgtcaagtgcactgtctgcagagtctgagaacaaaggggaccggaggcgaaaagggcgacaaaacacaacaggacttgatccccggaggcgtggaaggtttcgtgcaggaccagcagacgattctttcaggccgacatctttgtccgcgcgagcaatcgcaatgctttgttcgggtccaaggggtggtcgtgaatgggaccgggattaagtagaagagaagaaaaaaggagagcgaaatcgaaatcgaaatatcatggcgaaaaactcccgtcgtgagtgcattacatgacggtgcagcaacccccctgttgctgaggagcgtagggatcctcgcgcttgtcaacctaggaaatgaagtggttagtctggatgggcgcgcgcgatgtggaaaaaggccggtcgcatacctgtccccatacggatggaaccataaagtcgcgagtgttgttgcagtagctgatgagactgttgaggtgttagttgtttgctttctgaacatagaaaggatcaaacggacgaaagagctgcctcggagaccttgacccgtggacggtccagatcctcctttagacgaccattgagctcggtcaaccgacgatatttcaagtcggcaacactctgcttcttgttcttgacatcacccccggatcgaagttcgtagggagccatcgtgacgtgttgagctgtggaagaagcgcgaatgggagaaaggggggagagggggtttttggatcggcaggtgttccaagggcgtaagaattaggttaggggggggggccgggtaatcagggggccaagacgccggacaaagaggaaggggaggaacaaaagaaggtgaaggagtcgggttagagtaagagagagagaatggacaaatgaatgtgttcagaggggattttcctgaggagatgggcaggtccgtgggtttcccttttttccttacacgggggatattattgggaggggaggtacccggtacttggcatgagtcggacgactactaatgtttgataggtggatacagtacataacttgtaccgggtacttcctgtctgaactctggattgtgtatatttgtcgggctcggaatgagatagttggaattgtaatctttagttacatgacttggaatattgcagtcaaccaataagaaaacatagtcacaatatgcacggtagtcaaatatgacaggtgtctgactatgtaccgacccaaattcgatatctgcctcaggccacaacacgtgatcgtcatcgcttaacgcgaagtgggaacattggcgggatccaatttttgctctggcctcaacacgcacattgtgaatcttcccctcgttatcgggtattcgcgtggcagtctaatcgcattattccctgcccgtgtgtgtcgctggcctcacccaactttttttgtccattttttaatttcttatcagtcacctttgatcctttcccaaggggcatccacccatcatgccgcctcctccgcatattaagcctgagaatgtcctcaaggtaagcgtcgccgtcgctggcgtcatggttcataagatgcatcggttgctaatgactatatcgtgcacagagggctcaggaactcatcgccgtcggccaggctcccgccgccttgactgtcctccacgaacatgtcacctccaagcgcacccgtagcagccccatcgcctccctcgagccggtgatgctcctgttcgttgagctgtctgtcgacctccgcaagggcaaggccgccaaggatggtctttaccaatacaagaacatcgctcagaataccaatgtcggcactatcgaggttcgtgttgatgatcgctctaaaaaaaaaaaaaagatgaaaaaaagtgtcttgtcactaacttaggatttcttccatgtgcaggttgttctcaagaagttcatcgaactcgccgaacagaaggtcaccgaggcacaggccaaggccgacgagatccaatcgaccctcgagtccgccgctccttcctccaacgttgaggatttggaggccatcgagacccccgagactatcctccttgcaactgtctccggtgagcagtctcgcgaccgtaccgaccgcgccgtcgtcaccccttggctcaagttcctgtgggagacctaccgcaccgtcctcgagatcctgaagaacaatgcccgtctcgagataatgtaccaatcgactgccctgcaggccttcaagttctgccagaagtacgcccgtaagaccgagttccgccgcctgtgtgagctcctgcgcaaccatgtgcagaatgccgccaagtactcttcgcagatgcacgccatcaacctgagcgacgccgacactctccagcgtcaccttgacacccgcttccagcagttgaacgtcgccgttgagttggagctgtggcaggaggctttccgcagcattgaggatatccacactctgttgaacctcagcaagcgccccgccaagaacattatgatggccaactactacgagaagcttgctcgcattttccttgttagcgagaactacctcttccacgccgccgcttacaaccgctactacaacctcctccgtctttcttcagtggccctggccagcggccagagttccaagaaggaaaacccgtcggtgaccgagctcgagatgaccaaggccgcgtcatttgtcctcctttccgccctgtccatccccgttatcagcacttcccgctcccgcggcgccctggtcgatgtggatgaggctcgcaagaacaagaacacccgtctcactaaccttctcggcatggccacctcgcccactcgtactgtgctcttccgcgatgctctgaacaagggtctgctccgccgtgtgcgccctgagatccgcgagttgtacaacatcctggaggtcgacttccaccctctgtctatctgcaagaagattacccccatcctgaagcagatcggtgccgaccccgagatggagaagtacgttgtgcctttgcagcaggtcattctcacccgtctgttccagcagctgtcccaggtttacgagtccgttgagctcaagttcgtctacgagcttgcccagttccctgctcccttccagatcacccccgccatgattgagaagttcatcatgaacggttgcaagaagggtgacctcgctattcgagttgaccacatctccggcgtcctgactttcgactccgatgtcttctcttcctccaaggctacccacgccggcagcagcgctggctctgctgagagtgagtttggctctgttcaacgtctacagcacacccccgccgagattgctcgtttccaggttgcccgtctcgccaagaccctccacatcacctgtatgtacgtcgatccctcctacaaccaggctcgtctccaagccaagcagactgctcaggcccgcgccattgctggtgtcacccaggagcacgaggagacccttgcccgtcgtgtccttatagacaagaagaaggaagccgctaccgatgctctgcagcggaagcagcgcgaggaggagactcgcaagcgtgtccgtgcccagcaactccaggatgctgagaagcagcgtctggccgatgagcagcgtgatcgtgagctcaagcgtatgaaggatgagcaggatcgcattcgccaggaggagctcaagaagcagctcgaggagctcaagactggtgttaagggtattgacgtcagcgagatcgaccttgacgagcttgatgccaaccgcctgcgtgccatgaagctggctcagcttgagaaagagaagaacgagctgaacgaccgtatccgtaccactgctaagcgtatcgaccacttggagcgtgccttccgtcgcgaggaactcaagtatatttccgccgattacgatgcccagaagaaactcgaccgagagatttacgagaagcaggtcgctgatgaactgcgtgagtctaaggagaagcataccgaggccgttctcctcaagcaccgtctgggtcgtctggttccccagttcagcaacttccgccgagaggtttccgagaagcgccacgaggagttcgaaaagcgtcgcaaggccgccgagcgtgagttcgaggccaagaagaagcagcgcgtcaaggaggttcaggaacgccgccgccgcgagaagcaggagcgcgaggaagaggaggctcgtcaacgagaggagcaggagcgtgccgagcgtgaggagcaggagcgcatcgctcgcgaggaagagcgccgtcgtgtcatggctgaggagaaggccaagcgtgaggaagagcgagcgtcagtattcccctattttgatttcacttcaaaccttagtactaacttgacatatagtaaaatggatgaggtggctatgaagcagcaacagcgggaggccgaagccgaagcccgccgcgcagcccgcaagggtggattcgaagagccactcgaacgaactgcaccccgtctcaatgtcgccccacgcactggagtcccgtccacctggagagaacgtcaagccgccaaggaagccggtggtgtcccatccgagcccgctcgtgagcccgtccgtgtccccgtccgcgcccccgtccgcgaagagcccgcccctctccgcaagggtggatatgttccccctcacctgcgcaccggtgccgtccccagcgctggatctgcaccccctccacctgctccccgcgagcctcgtgaatcccgcgacactctgccccgtgaggcccccaccgagcgttgggcgccccgtcaaccccgcgaatcttcttctcagtctcctgctcccgcttcggaatccaagcccgccgctggtggcaaatgggtcccaagatggaagcagcagcagtaaacgaccgagctacgactttccagttaaaaagtgtatccaagctcttctctttttggcgcaattctcatgacccttctgcatatttcgtgtatcattcacccatgttcaccccgtaacttgttaatgggggccccagttctgtctttcagctcgctcggaatatgatataatcttttcctagttttcgctataatttggtggtcttgtagatgttttggacagctctctttcttcctatctacggacaatggtggtttgagccgatgctaaccctcgacgacatcattggccccgcacaggtacaggtcgcatacaggcatgcatctagaagcgggtatattttttaatgaattatgaggtcgagtatagaatagaaagcatgagtccatgaagcgaattggaatggatggtatcacgatttcaagtagaaactgggaagctcgctcaacatgaacaactttatgaatgatgatatagtaaacatcaatatggatatctgacaagagaataagaaaataaaagacaacagtctaaattccgagtcctgacccgaggaaacagaaacagaaacgcaaaaagtgatcaagtcatgaacatcaacatcgaacttatgcagcagccacttcggcattagccccaaatagcttctcccgccattccccacagacagcttcaaagccactgactacatcaccgcagaccttaccagcctctcggtccttgagccggcggtcccactcgccgcgctcgatccaccgcgaaccctcttcgcggctctcttcttcccgccggatgtcagcgacgagttctcgcgcagagcgtaatcggcgggaagccgttgcagtcaattgtctcgattcgtagagggtatcgctcaagccgcgaagtgtatgtgtgatatctgctgtttgcgagatgagggcttggagagaggctagggggttgtgtgcggaggactgaggggttgttgattgggagtcttggtgttgttcagggaagggatatggaagatttggcaataagccctcgtcgataaggggcatgagagagtcgatggcgtcttcggaaaggagggggaatggagagaagaggagtgggtggacgagggattggagggcgcgcgtttggtgggtgagatgtgatgtgattgaggaatgagcggtgataagtctgcgactgaagattagctatcgagatcggtggaattgcgtcgtacttcatgaacttacctcatggcactgttctcaatgccactctgcccaccaagatctttcaaggactcgaccgtgcgctgaatgacatggtcattttcacttccattattctctataccccgccgaacgagactctcaatctcagccatttggctctccaaggcgggggatatatccgccgcctccagatccgagtcaggcccataatccgagccatcatattgcgactcctgccggcggtgctgccgcaaatgattggcacggtatttgttctttgatggatggagtgaatctctttctggtgagatagatggtgaccgggactgcacgctgtgaactgattgcatatacatatcttctccatcactgtgacccatgtgctgtgaccccgcacggctagcttcctggcctgacgcatatccatatccatcttcctcttctccccatgcatcagctagctcatcggccaggtttcctagtcctccgccgcctgcatcagcggcgccagagaaatccccggaccctctatgggacccactcatggcgttggagttatggcgggacgcggcaggagatggaggtgcagataatcggggtgtccgcagtgatctggggctttcaattgcaaaagtattcccagtcccgggggagataggtgagtcgtctgtggccgccgatgggtagcggtgtgggagtttcaggggagacggaggggggggcattggttcgttggaggtatcacacgggatctcctggtggaagctttactgaaaagctggagaattgggttggggcaatatagccagagaaaaggaacaagcggttgtagtctagttgcaggcgagcaacagttgttgattaggacgctgaattgaatggtccgatatctccgatccgggtcaatatatagcgcagtagcaatggaacaaagaccaagctacggtcaattgatataaagaacgcgttaaaagagcgacttctcaattaaggagtgactgcatcaccaggatgtaggaggggtataacacaacaattcatcttcaacctcaccgccgactactactcgtcaccgcccggcaaaaaagaacaagagcatcaaaccccacattatcacactcatatttcccgatatcaagatacccacatgagtattttcacatttataataccaagatgagttctattgaacgcatgtccccgttggacctgctagaccttaaccttacaaatctcgacccgctcactgagaattatgacctcggcttctacctgaactacctgaacaaatggccctcattgttcagcaccgtgaaggaccatgatgccggcattgtaggttacagtatgttgaattctccccctagcttggcacatcctccttaggctccctggatatgactgacatgttccttcgtagttatggggaagctcgaagagcagcacccagcaatgcgtcactccgagcactacacaccatggcatggacacatcacagtcctgaccgttgccccagcctggcgccgtctcggatttgcacgcaggttgaccgaacagcttgagcgaggatccgacagcaacgacgcctggtttgtggatctctacgtccgtgccggaaataaagttgcatatgacatgtacaagggaatggggtaagtgtggcgatatagatacgtccatgctgaattgatggctgacgtatagttacaggtactctgtcttccggcgggtggtcaattattatagcgatgatccatcggggatgtcggatactggggaagatgcgttcgatatgcgcaagccatgcagtcgagataagaagcttgagcacgtgagagaaaacggtgagaacttccctgttgggccggaggatgtgatgtaaagcatccttctttctgtggttattgaagcagccatggctgtcattatttactatctctccccttttcttcgagggattctcatggaatgggggggttacgcagggctggggttttgatggatatttgtacaaaattagacgtatgatagttgccattttcgtctaagtataacatgaagtgcgctgtgtctcccactggctgggaggtaatgcaatatgcaaaattcaaaacgatgaccgaatgatgaagctaatggtataatcgttgttcaacatgtgtatgcgaagaaatagccggaacaaggccgaatcttccggggtggtgggcggcagccaatattcaaaccttggcatggaactcaagacccgagcgcagaaatctaacacaggtcataagaaccgtagaggtagcgagacagcacgcggtgaaaagctgaactccgagaaattggtttgtatcggccaggattgcaccaccgatgggggtaccgatcaacagacctatggaagtgatagcaaagaccatacccaaccgagtgcccagattgcgcacgtccggagtcatgcttgccatgaccacaggtggcagagacacaaacccacccgagaagaagccgtagacgacggcaagaatgatgatgccaggtacggtgtgaacacggatccagacaaaggctaggatggaagtgatggtcacggcgggcgtgagcatattcaaagggccaacgtggtcggcaaggaagttaggcgcaatacggccgaaggtggaggcggcgtttagcatggagagtaggtagaatcctaggttcgagtctacaatgcctgtctcaattgcgtaggactgcacatagaaaaggaagttgtagaagcccaagaagcccatgaacatggcaatggcaaagacagtaaaggccggctcctttaaagcagacaactggtagagctttcgcttctcctttggctggaagcgcgagcgcatgatgctaatagaaaaacaaatggtgccaaagcagacgaatccaagagatcgggtagcccaggcaaaaccgaccttcttctgcaactgatcgaacatgattgggtagattacaccaccaatactgctgccactggcagctaagccattggctagtcctctcttacggtggaaatactgcggcaaaatggcaacggagggcacgaaaagacagcctgctgcaagtccgacacaaacaccttgggaaagaatcaggtgccagtatttagtggcaagactggtcatcatcaagccaaagggcagcatgaatgcagcggtgatgaggagggatcgaaaatagccggcatcaaacagtggacctgtaatgactccaatcatcatcagaaggaatgactgcagcgatccaatccaggcaatggtcgatgatgaagtaccgacgagcaactctcgctcataataagtttgatatgctccccatgtattgatgattcccctgtttcaacgcattaacaataggatctttatactgaagaacttatatattcttaccatgaattgaaaaaaagaaagaatgagcccaaagcttggagccatgtatgtagccccgtatcgaatgttaactgaggcccaggctcttcctctggagaatgtgatatattggagttgacattttcatcgcaagtagacgaaggatcagcgagtactttttgctctatatctaagttagttgactccatgttgtttcatgtcacaggtgagagcctgtacaatgtagtcttagctgtgcaatggtcaagaaagtgacaatcaatgatataaaaatctttccagttgattataaaccccaaaccaagcggggttggggtatagggcgggcccccccgagatcggccattcggccattcgagagatataagaaagataaccgggctttcactcgaatatgatatatagctggacctggatatgttatagctacttgagatttgttgaaataacatagtatatcctttgtcaaccaagtaaacacccttactgacagcaaatcggtcgaaaccaacctagtcaccagcgaggtcaatgcactaactcagatgtaacattgaatagccgaacttgtttttcgtcgagaggacggtcttaacacaggcagacgtgcctggaatacagatggatatggaaatgactctaaatatcttatcaagtgcatccagatgttgatatcaaaattgtaactggaagtatacagacacaaaagtatatcactgaaatcctgacaatactcacgtggccgctatgattgcttctatctgcaggaagataaacaggtcaaattatttttagatatgtttttttttccgttctagattcatgtacaaagcctcattggtgtccatgtttcatcaaggacatccaagtctcattttttttgacgggttcttcgaatcccagaactccaaacgctatgctgaaaaagaaaagcaaaagatataaaacagcctccgtggagagcagttgatagagaacagttgataccggtttgaccactacagcagctcctcacatgtccaatcctcatacctaaagtcgaacattgttagacctggcccaccaatcatgtctgacaagatattgcttaccatccatcgggcaggtatcggcgaatgatcaagggaatcttcttctggttcaattccttcatggcgatctggaggggatcggtttcaccttcgaggtcgacaagaacgggggcgttcatactatgccaaatgtcaacaagctcaatttcacgtaacaaatgcgcaatcatttgcagcaaaagcaacgtacctgatttgcagggcacgggtaccaagaacacgcgcgcgctcgtacttggtcaagtacggggtggtggtgcgctggtcattgggtactttcttctcgcgcgactgctccagcacttttcctgcgtatccagcatttggatcgccagagacaacgacattatcgccgttggtggccgggtaatcatctcccccaaccgtgtcttcgccctcgaggccctcttgttcctccggctcctcatcaaacacatcctcgccgggctcgtagtcgaagctgcgcacaccacattgttagaaaacgggtctatacaagtatacgcgaacacgctgtgaagctgccaggaggcacaatggaagcaaagctcctttgcgcctagtccctgggcaatctggtgaagggtagcttacgtctcttcgacgtcgtcgtcgtggccgtagtcagacataatgacagttaaatctgcaaaggagcgaactgtttgtaggccgaagcgagcgatgaaagacccagaggtatgagagacaactcgggggtcgaggtgggatttgatgctaaaaatcttgggagcggaaaaacttcctctgtgttgaccgtcaccgcctttctggcaaaaataaaaaatattagtttggcattgacgtccgaacttcctcatgccttgagatacttttcctttctcaatcgtccttttcagggcgtctcatgatggccatgaaacgcaaggcctcatcggagggaatcacaaccctcaaacgacatcagaaggataatgtccttgacaattccggtaagtttacgtccacaggtaacgtccaataaagtgatccaatttctgaccattctacagatctgatctaccaggagactcactccgatgcagagtattcggctcctagtactccaagtttaatgagcgaagacatggacgaatctccggcgaccccattctcggccacctcctcccgacaggtatacccatccgagctcaaaaccctatcttgtccgttcgagggctgcgataaggctttcaatcgtccagctcgactccaggagcatatccggtcacacaataacgaaagaatcttcaaatgtgaggttgaggactgcgacaagacattcttacgcccttcccatcttcaacagcatgtcaagagtgctcatacagatattcgagactacgtttgcgactatcggggttgtgggaagagctttgtgaacggatcacggcttcgccggcacgttgctacacacgatggacataacaagtaccgctgtacggagtatccaccttgcgacgagacattccggaagcactcgacgctacagaaacatgtcatggttgcccacttgaaccagaagccatttccatgtgatcacgtggacccaaccaccaaggaaaaatgcaacatggcttttgacaaggctggtaatctacggacccaccagaggagagtccattccgagaaacgattcacatgcgcagaatgtgccgaaaatatggaagctcaatcatcaaatatggccgacgacgatacaaaacaggatgtatcattccccacgtatgccagtctacaaaaccatattcagattgttcaccctccctcatgccctgagtgtccattggtctgttcgacagcacgggggcttcggcgccaccttgagatagcccatggcaatgtcactcttgaagaacgaaagatcttccactgcaccgtccctggatgcgggcgtagcttcaccaagcaaggcaacttgaccgtccatattcgcacagtacaccaaggcgaaaagcggtttgtctgcggcgaaacggatctttcaaactccaacaagctggagggatgggacggcgtcggttgcggcaagcgctatggcaacaagctgacactcgaagaccacatccgcacttcacacttgggtctcccgaatgccaggaaacggcgccaagcgaaaaagacgagcaaaaagccggcgcaggattcagtttccactctttctgccctcacgggccaaggctacgccgaggaaacaggtcgacagatcgcttgcttttaccccggctcgtgcccacatcgtttccatcgcaactacgatttgtgggtccacatgaccaccaaacacagctgcaccgaagatgaggtccagaacctcttcatgcagcgcgcgttgcttacagatgaaaccagcgctggagtcaactcgctgggtatatatggtcttggatatgatcaggatggtcggtcctactgccatcaatcatatgcggcaggagatcactcttcggatgttgctttcggctcacagtcgaacgattcctcctatctccctagtcagccggggttggattctgattatttgatggcagatgattctccagcaaggacagcacattcattcttcaatacccagtcgtaatcaaatggcactggttgacactgtttgtgcttaccattagatggaacaatgatgaagggcatttgtacgatgttatgattatctagcgttttgatgcatatccatggacttttcttcaaagttcctatttctcaacagcgtgttgatttgatattttgacttgacatattcaattcaccaaggagcggcttcaaaatgaattccaatgttaatactgatcatctatgtagccttttagacaccgtagcatcaggcctagagatcaggggtaccctcgccttgttatgactggcttatccctacgtggatcttaccctcccagaacgacttcgttgccaatggttgaagctattgcgtgagacggtggattttatgtaatgttctagctcggccaacgcactaaagttcttgatcatagtttatgtcattatagtacttcattgaacgagtgaaagcgaaagaacctgggatatcccatcaaacaaccttccaaggttcgtttcattagctcccgccgtggaactcggacccacttttaatccactttgggtatagctctctattaatttgtacaacaaactctgtaccgtacctatgttgtaggtaaatatggatatagtatcatgtatgtactctgaatatctggctcagaaggagataagcttcggattttgaaagcagactcctacactccggcccaaatccgccgtggatgcagtgaaagaataccctaatcgattacggatttcggaggcaaagtccgcttctacactcaaggggctgaatctgggatagttatgagtgtagtgtatttacaatcaacattcgaataaaagaagtataatctatactatatatctatcatgattcggtagtcatcacagtatcaataccaacaaatccttcactcgaagcacttggccggacatcttctcttgcaatggccgagacgaaatcttccaatttggaaaatcaagatggcgtcgagatgagtgcttccatccataatacagagctcaagcgccaatatccttcgggcctggcggtcactcttatcctgacatcagttactctggcctatttcctctttttccttgatcttgctgtcatttccacggccactccagccattacttctcagtttgactcactagtggacgtcggttggtaattacatatccatttacttgtctaggccacaactgctggtcttttgtcgcttttttccgagatgctgatctctctaggtacatttcagcccttgagcggcaagatttacagccgattttccatcaaggtatatcttggttcaagcatcgtgactacgaaagtcaactctgacaagatcatcatatagtggacctttcttgtctttttcgtcatcttcgaagtcggatctgctgtatgcggagcagcgcattcttcggccatgttcatcatcggccgtgttatcgcgggtgttgggtctgctggtgtggccaacggtgcagtaacaaccatctccgccgtcctcccaacacaaaaacaggccctttttatgggactcaacatgggtatgggccaggtgggccttgcaacggggcctattattggaggcgcttttaccacgcatatatcctggcggtggtgtatgtaattccacttcttggggtgatttttaaaatgctgaagtttctatattaggtttttacattaacctccccttgggtgttattgtcggcgggttcttctctttaacacagtgcccgagccaaagcctaaggatccgcccctgcagattcttagctctgccatcaaatctctagatctcccaggattcatgcttatttgcccggccgtcgtcatgttcctcttagggcttcagtttggcggtaacgattatgcctgggatagctcggttgtgattggcttgctagtcggcgctggcgctacctttgttgtcttccttatctgggagtggaaccaaggggacaatgctatggtgccacttgctatgcttaaacaccgagttatttggtcggctgcactgacaatgttctttagcttgtctagtgttcttgttgctgatttctacattgcaatctattttcaagcaatccacgatgacacgcctctaatgagcggtgttcacatgctcccaatcaccctcagtatcgtcctattcactatggtttcaggcaccctaagtaagtgattataattataattttgtccactgatcatcgctaatactagaaagtttccgttttgggctactatctcccatttcttcttgcggggggtgtgatatcatctattggtaatggactcttgtcgacattaggtgctaccactccggttgcaaaacgggttgggtaccaaattctttacggtgttggaagcggttgcacgactgcggccgtaagtccgattcttccgaggttgacgaattataaccctatgctaatccgtaccttcaatttagccctatatcgctatacaaagcctcgtggctccagagcagattccccttgctatggccattatcatcttctcgcaaaatattggtgccgccatctctctgatcgctgcgaacgctatctttagcaatagccttcgttcggagcttcaaaaacgcgctgcacagattagcgtttctccagacgccattatcaatactggagtccgctccatccgtggcctggtgtctggctccgagctggccgctgtgctcgcagcctacgccaaaagcatcgacaaagtcatgtatctcggtattgctgtcagcgtcgccgtgttagttttttctccgggacttggatggaaggatatcaggaaggtgaagcttcagctcattactgaaaaatctcctagtgtaagtgataaagatttggcagtgattggagaaaattagggtcgtttgtcagcaaaagaggtatattcatgcttcttcaatatcctttcggcatgtctaccgacgaggtggtccactggttgttccactgttcttttagagagaatttccttttctaggctgaattcttgtccggacagtttagataacatttaatactacttttcagtcacatgcttcactgtcgataagttgttcgatgcaaaagataataacgggatccgcattcacatttaggtatggggaccatcaggctatcttcgtcggtggcgtccctttcgttcttgtgtgcacttgcatgtttatttgaccaacaagacatacctaagtgagaaggtttgatattatagcatgaaaagttactattgtatgtaattttgcatgagtatataattgatcctgtactgctttaactaaactttatcctgcaaactgggtatcctttttcactaagctaaagcattacgacaagtttctttttcgaaacaccctttctctgatggagagcctcttggatattatctagccttttgcccacaagatgcggaggaggaggtggcacaaactggccttggtcaagtgcccgtggtaggaaatccatgtagatatgagagacgacgctatcggggtcaactaggccattgagaagaccgaatttggcattcactccggtcctgatgcgcgtctcgatcgatttgattataccccccatcatgccgatcaagtacgtgcctttgccaacaaatgtcgtgagattctcggaagatatgatggcgcccgccacagtaatgaatttccgagtgagtttaggataatgtgtcttcataaccgcagtgcatgcctcagcagcaccactgccaattgtgtaggcgccaaccagcttgtggccttgcagagcaacgaggaggtccttgaccaaacttttgctcctgtagtcgaagactttagtggcaccgagacctttgaacaggaaatggccaatggtttgaagatgtactactaggtatgccacgacatttactagtttattgtaaatgatttggagcctccagagacgactagtgccactcgggagaacatctcaccttttatatgggtttagtcctcgaccgacaaatcaatgctcggatttttacagagagcctccgatcatcaatacgaaaaaggaaaagtgtcaataaccttgaaataaccttatttccccaacgggcattattaaccgtggaaccccaccgacacgttcaaggttgttgtatagagcggggtccagatgaaaaagaatcgcacctctaaatccctgccacatggcggatctgcattttttaaagtacctatgacgcgttggtcggatctccatgggggccatgctgatcttatgctgcaggtcagcaaatcttggatttgatctatgccaagactgcgaccggctagtataagacattgtaccgagtacgtattatatacaccatttgtattccgtacaaactagttaattaagttccaagtttatccgagcaaagattgtggctggatctaatgcaggaggtcccggagtaaattgaaatgatggttagctacttatgtactgtagttgagcatggacttcaatggtcggtgaaaaggcatagcgtgttcatgcggacccataggaaacgcaaggaaggcaacgtgtgagggtcaatgggcagaatttgccaagccaagctcacttccgtcgagagccagtagcgcggatgccagccttggccacgatgggaagtcttgtagaattaaggggggaaattgggaaaggagatactatttagaaatacgttgtataactcaggggaataataacatagttgccttatactagtcctctgtgctctgtactccgtagttctaacataagacatcctatatttatccacccatgcaaactagtctacttatagtcggcttgtctctccaccgatgatccaaggggataacgccaatgaaaaacctttgttcaaggtctcaatgcaaagagaaagaaaaataaaacaaagcagatattggcttggcttcagcttttcaagtgtcgcacgagacaataagtatatcattggtgtagcgtggaaatgttggaaggtcttctcttcgcctccgggacttgccccaactgatccacagtagttcttggtcttctctctctatcttctcttcaaacctccctattattccatatcccattcctccacctctctcttttgctggaaattttttaaaaaaggacccgttaatcccggtgattagcgacgtattcggcttgtaacgtcatcttccttggcaaagaagctcgacttccctaacctccaacccaaccactcgtttttttttttttcattcttattcttccaggttcacccttgtgtggattctatggattgatctcttcgtcgccgaattcggtctaggcgcagtcgctatttcacagtctctcgttcagcgcaatcgacctgcctcggccagtttccttttaaatcctaccacgccccagtctctctccttacctgcaaggcgtttcacagtctaactcggtgaggggtaatactcaaaagactactgagcttcttgtccgcacttcacgttccgacgtcatgggtcgttcgcgtggtaagtcgatcctctccgggtatgccgggaatggcactagagcccgttattgactctcccttgcgtggaactagtccgctcgttcctattcagttttgggggttcaaagaatcatgcttctgggaaagagagcaaaaaattgtcgagcaacgttacgccggtggccaacgtggccaacgtaacctcgtccgatacaccaccccagtggcaaaccccccccgatacaccatcccctcctcccgaagcatcccctgtgagctcaggaccaagaggcggaaatgcgtcgcgaccggcatctatgatcttctcacggaacccgcctctcatgcatcagacgggcgataccccaccggagctgtcgccaatcttttcgttcctcaatatccacacgaataagctatatcatgaaggatactttttaaaattgaatgatctggattctcgtaagcgatcgctggccttggtgcattgcggggcaagggctaacacgtggcagatggacggccttctggtgatcgacaatgggtggaatgctacgcacagctggtcggaactgttctttcactatgggatggcgctgcgctggacgcagcaggtggagaagaggttccggctacctttatcaatttggccgatgcgtctctcaaaatggtaagccttacctgtctgaatcgtcaggcatggactaatcagttactcgcagattgagactcttccgattcaaaatggagctatagaaccgttgaagaacgtactcagcctttcttccgctggcaaaaatcgatacctcttgcatttcaattctttcaactcattgacccaatggactgcggcgattcgtctctccatgttcgagcacacatctttgtacgaagcttataccggttctttgattgcagcgaaaggtagaacactcaacggaatcaactccatcttggcacccaccaaattcaagtacgaagattgggcgcgtgtacgatttggagcaggaaccccgtggaggaggtgctggtttgtgatctgcccgccagatgaaaaagagctccacaaagcgcggaaaatcatgaaaaaatcggcatatgaccgcttgtcaatgccagttaccggcaacatcaagttctacgagacgaagaaaactaaaaaggtgactcccattgcaacggttactcaggtttactcggcatatgcggtttatccacaatctacggctataattgatgcatcgaccctggtgaagttggaaggacggattaccacacattcgcctgattcttcttcggagggacttgtctttatcatgcctgagccacatcctgcggtttctggattcgagatgatgctgcgcttccttttcccgacgttcgacactttcaatctctatggccgtcctactcgcctggtggcagacactaatcacatcaagagcatcatgtttgccttccccaaggagcgacggtacggctatcttgatgtgctggacattgccaaccttcttcaaaccccgggaagccaagaatggagtgaagctcagtggagaaaacagctcaaagaggcaacacagcgtcgaatttcgtctggtaggagcagaaccaatagtgtcaacagcgtgagacctcgttatcgctcgatgtctggccgacacagtgatatccctgtggactccgctcggcgccagtatgctgatctcgaccacaagcctgggttcaaccactccaccgaggctatcattcatgaagtccctcaaaacgaggacttacccgctgtgtatgaccgcccggtttctgataacacaggcttcaacactggctctcggctaggccatgaatctttaatcgagagctcacctcactcatctgctcaagatctgatgcaccgtggtgttccagcgttcgatcctatcgctgagagcaccagttccggaagcgaaccaaatatcaaccacctccgaggcccgccagttgaagaacagctccccccacgaaccccaccggctcctgttgaaaacccacccccattttcccatggacccagagagatgcccactaaccggccagaggcttcttcggagcagaggttggcaaacaaccggatgtctcacgcaacactttcccaactcacatcggtcggaactatgggaatgagcgcggcagccgccactgctgcatggaaaacccaccagccccaggatagggccttcaacggtgtctataagcctggaccgattgtctccgcaaactctgttgcaacttcatcgagtgatgaggatatcagtcttgctcttccggttcgacctccctcagttcctgagcatcgtccgatcacacctagtactggcagcccacatcggccttctccccagcagcactctcctcaacggatgcacattgatgccaacaaatctgtgcgacgcaagccactccctcaacaacagattttcgggacagagccagagtcaccagacgaaccgagttatgatgatcttcgccatacccttgatgaagatgcgctgaataaaattgcgcctcatcttccatccccagcgtcatctgttggaaatagaaacggaaacgaggacgacagcatttacgatgatgcatcgacagtttcgcctgactatgctagcacacacggttctgtctacagcaagaaatccgtcgcatccaccaaacctagaatgggtgtcatgaaaactgtgggagtcccagcagtcaaagattatgtcattggcgatgctcattatactatggataagcccccgacctcgaatccggatattcccagtgttgacttcggcccaactatgacatatatgcctactactgggcgcccaaccacatcagataccctgagaagaacaatgcatcaacgtaatgattcgtcggggaccaaaattgcggttccgactcaagcaatcgatcaggctaatgcgcggccttccagtcgcgaagaatatcgacgcagcatgctgtggcagcctggaatgggttctcgccctgtcactccaggtggaggtctaaccccggagcagtacgtgcagcaacgggcggcacccagtcctccggtgcaggtccacaatcgcaccccttctaatcccatgtcagtacaacgcccggtatctggcgactggacacataatgtccgttccaattcgcccatgagccctcagcgggatcccaattatcgaccttcgtctcgtggtgcccaaggtatcctcaattacaacgatgcttcaaccaatctttccgctcgtgaacaggagcacgttgcccgcatgactggctcttcattcttcaatatgtcaaatgacaaccgaaaaccacaggcgccagtaagccccatgggccttgtctcgcacatcgatgctcgggagcgcgagaagcgtgaaataagggagggaatgtcgaaccaggcggttcaacaggccattgcccaccgtcagcaacacatgatgcaacagcagcagtacgcgcctcagcagttcgcgccgccgttctcgccgccgttctcaccgccattctcacctcaacagatgcagacccaacaggctggctctgtgtatccatctcaacatggtcgccacgagtccatgtacaacattccggttgccagccacacatgggatgctctaaaccagacaatccgccccgacgaaccccgtcgatcgtcctggtacggacagctggctcctcaaacaccgcctagctatcaacaagaccagtatggtcaagaaccgaggtactacagccatgctcaatagaccggttctttcccttgggtctgacctatcattttgtcactacctcgactttcctttcgattttttcaacaacttattccctgcatattatcagcagcatcaatttctattctgttcaaatcgccattcctgcatacataccaacctttgcacctggcttccaacgcgttcatctttcacgcagtccttctcttttcgccctctaacatcactcattatttttcctttatctctcattgcttctttgcatcacgcatccaatcggagttccagatgggcgtggtgggatcgtccctgatttttcatgcgaatcgcttgcttacttatcattatcggggtccttgcttttactttttattcacatgttttgtgccagcatgtagatcagactcgtggaaatatgtggcctgtatgtacgccgtatagattgatcatggataccatacccaaccaggtactatttgtcctttccatatctgcattctttctattgttctctaaagtaagcattttgtagtagtaagaggtatgtacgcacatcgtaaacgatagttgcattcaaatgacatagaagatgggaaagaaaagaccttactacgctgtgaagcatattttccgaacgcaatcaagcaggatgtcactttacaaccggaatatctagtactccaatcatgtttcttttcaaacctcgctaccaatgtaggacatgctacaatatacagaattttagtgaggcttgtaagctacgacatccttctacatcctattagttcgccatatcaattccacgctccacacacacagttcagttcatacaatgataggtggtacgcccggaaggcgagcgcaaaaccggcctgatcaggggaaccctgttaccaatcaggatcaagtagactgtatctacggagctgtacattgtatgatgacaattattttgatatagaaacatcactgagcgtccttaatcggtttacgctatgctggtctgcgctacaacatagtctggtgtgatgtaaccttgtatatctatagtgccttgaatgatagtcgggtacaacgggtgtagagaatatatttttctattatacacttcttgtcgtgctatcaaccgttcttgccagggataaatgatttatacattcacagtatatatatggataatttcggtgaatccaatgggactacttaacccggagaaaaccttatgacagcacttctccacctaaccctctgtcttatctgtgaattgaacatgaagaaacatatgattgaacatagagactgacatttgacgtaacctccagggctctaatgacgtaatggagaacattggaatactggggaacaggttttccccggtttatagtggatttaatctagagatggttggatttaattggatacctgaccttgcttgtatatagaagtacacaaatcctagtgatagtgtcgaacggtcaggtcgccatcggaggtatatgagagcagtgtccgccacttctttacatactaatagccaccctgatatcatctgttgtgcaatttgcatgcatagaataagccatttgtttattcattctctatgtaccgttgtggacccaatatctatataatagacttaatcgactgcccgaatggacccttcagtccccgaaaatcccgaagcgtcgagcttcaaggatgaagccagcccacaagcaattaagaccgaagcaggacggggtgctgatacccacgctgaatatgcctccaactccgatacagcaagccaagaagacaaacctaagctgcgtaccggcggcaagcccgagctaacagaagatgactgctacgaaaagctcggcttctgcttcccaacatggaagaaatggatgattctctccgttattttcgcggttcaaatgtccatgaacttcaacacaggcgtctactccaacgccgtccccggcctgaccgaagaatttcatatcagcgaacaagccgcgcgagttgggcagtgtgtgtttctagttgcatatgcattcggatgtgagctgtgggcaccatggagtgaggaattcggccgctggcccatcatgcagctctcacttctttttgtgaacatttggcaaatcccatgcgccctcgcaccaaactacggcacaattgtcgtatgccgtgtcctcggcggtctcagttctgccggaggctcagtcaccctcggcatgacggcggatatgtgggaagccgacgatcaaggctacgcggtagcctttgttgttctctcgtccgtaggcgggtcaaccgtcggacccttcttcggcggtatgatcggccaatggctcacatggcactgggtattctggatccaattgatcgtcggaggtgtaacccagattctgcacttcttcatcgtgccggaaacacgcacgacaattcttatcgaccgtgaagcgaaacggcgtcgtaagaatggagaggatatctggggcccggacgaactgaaaaccccgcgcctggactatcacgacgtactacggatctggatccggccattcgtgatgttcgtccgcgagccaatcgtccttttcctctccctgctgtcgggtttctccgacgccttaatcttcgtcttcaccgagtccttcgcattagtctttgcacaatggtcatttagcgttctagccatcggtctaacctttgcctcaatcctaatcggctacataatagcatacgtaatttatttgcccgacattcaccggcaaatccaaacacggcgccaatacggcacagccagccgtctcgccgagcgccgtctcctccttctcctcttcattgcacccctcgaaccaatcggcctactcggcttcgcctggacatcaaccggcccaccaatcccatggatcgcgccgtgcatcttcgcctgtctgatcgcaatggcaaactatgcaatctacatggcgacgatagactacatggttgcggcgtacgggccgtactctgcgtctgcaacgggaggtaatggctttgcgagagacttcctagctggtatcgcgaccatgtactccacgcccatgtaccagaacattgggaaaaggtatcatctccagtgggcgagtacgctgctaggctgtgtgggcttcttggtcttaattccgatttatgtgttctactggaagggcccggatattagggctaagagtaaattcgcgcagcagcttgctgctgatcgggagaggaatactgagagtaggagggctagtcgggctagggcttcggttggggcataattgtgcttgtggttgctgtatgatattcagcctttgtatagttgtatagttgctagatgcatatattggatagatgtgttatttcgtgagtcctactcttatgttgtagctttgagatgtactatcaaaaactcggttctgcttcttctagaaatatatattggaacagcagatccgcaatggcatcatgaaagagagagcgttcccatcccaggaacgtggggaagtatacatccgaaagaggaaagtggaccacgacacgtgctagtatacaaccaatgcatgctgcccctatgtcgtatgtagttgcgaattgcaaaaaatgtacttctcaatcacattcgttattgatggatgaatagttactcttagcccataatagcgtaatggcaaaacagttataaaggtatctcaagaacgccacaagtgccagcttccctcgcttccacgatgcttcaactccctttccactaggaaaagtgtctagctcatgctaggatatataatcctatgcaaagagatgtttcgtaaatcctatattatctctgactagatattgacatctagctcgaatgcagcttcttgacgcgcatagcaccttcatacagaccgcggtccaaagcggcagcgacagttaaagtaccaccaatgatagcacagacaccagtaaggaagttagtgaaagtcttcgggcgagcctcacggttgacaaccttcataggagagatatcgtaattgaagaagacgcctggaataccgccaccggcgtgcacgcgctccttgtggccctccgcagcatcatttccaccggaaagaggacgcttgtgcgaggttaccgagtactgatgagcctcgatactaccctgagtaccgtatgcgaggccgtgggagccaagaggcgcactgtcgtaggcgttgtgtatggcagtcgagaactgaggatcccagcctagaggtaagtaggacgtcgagacaaccttgacaaagtacatgaagttgtaggcgggttcgtcggtctcctgcttggtatcgtcgagtgggttggtgttgtggtggtctgtccacccccagcggcctgcgagctcggcggggagcttgggcccgaagcgaagctcgtggacgaagtgggacattgtgtgctggtccgccgggcccgcgttgggcgcgatgtaggcgtcgagatcgtggacatgcatgttgccagtggtgaagctgcggcctggtgcaatgtggaagttgcccacaaccttgttgaccttcagcacaccctcaatccgacatccctcacggcgctgctcagcgagtttctcggcatatccttcgcgcttgcattgctcgatgttgctgccatcgccaaaggcccattgcttctcggcgtaggcttcacgaacttcctcacaagtagtacagcatcccggtttgatgacggttgggggaggtgttgctccaccacattcaccgcaatagtctggagccagatgcttcgcggcgtctgatggagagtgtctggggaaggaagataatgagtttgcgatcgcggtgtgaaggatttcggggtggcaggactggcacttacaggtccaaagcctggacatcaatcactttgccgccttcatcgcgtgggcttaggcggactttgctcacgccatgggcaacgccgacctgctgctcaccagagacatccatcacgtccaaagtcaacagctcacatggcaaccgagggaaggtcatgttcaagtgaatctccattcgctctcctgcgcagcaaaattttattgttagcgaccttgccgaccttgccctatgcattgtatcttctgcaggtccatcgtggatccgatcgagcccaaactctattcatacctcgcgatttatcgacgacaagctccggcagcaccacaactctccggtagtcggcccattcaccccataccagccacataacaatcaataacgaagcaattgtaatgacacctccggagttcgtgcgaatacgagcatcttcaacggtcttggcgaaggcatctagcctcgtgaatcgcgactttgcggacatctcgccggtcaattgaagaccataaggtgaagcgcaaaggccaggcaagggtttgtggacagcggctgtatgtcaaatgtctgtaagacagataacgcgaataggtcagctaggtggtcattggacgcgcaagctctattagtgagagagaccaccaaacaaacataacagagtaaaggaaatagggaaggcacccataccaacaatagagtccgatgagtcagttcaaactcaatgcgattgagtattccaagcacctgacaatagagacaagagcaaggctaatttgaagcctcaagtggccaggcatacttgcatggccgatggatgtatgaggagcgtgaggacagacgacagcatgtgattggtcaccccagagcaaggagatgagtcatctcctaattaggcctagtaactgacaatgccgcctcatcacgtgccaatcgtcactttttctttgaactcactttacttattcacggccctattgttctttggtcattcactttcactttcttattgtcttgcagctgcactacataatctgcagtcccccctcttctccagtcttttcagtttgctttttctttacctcccaccttcccgagtcatatctccattgcgatttcctcacatgcgaactacttctttctgcctgatctgaggcgcatagcgcgctgctctcttcaccttgatcgtttcacctttctttcacctttcctccctttgcaacaatctccgataccccaccaacctctcaaatctctcctccaactacgatgaagagcatgaagtcccgccgcggcggcaatgatcgcgggggaatccgcaagcggggccctactcgcaccgaccgggatggcgacatggatatggattcgggcagtgcgcgtgcaaagagaacccgtgctgagaaatctgccttgggtggccgtgccgccggcacaggcgtaggtggccgagctactggaattagcaaccgggcccaggctcgtaccaagcacagggattcggatctttttgagagagcggtttacagcaacaatggccaagcaaacgttataagtggcaacaagaaaacgggcggcgatctggaacagtttagtgtccgaggatggaaatcaagcaaggcggcgagcaaccgtgatggcggccttgagagcctcattgcattccttgaacgacgcatgaactcattcatcaaatccggacctcgcgccaagattacaaaggtatgttcctcgttcacaatagcggtcaccaacatcgattctcgacgtcccccgcttcagtgtcctcttgttttcgaggacgatcctcctacaaatcgacgatcgacacattttgggctttttggtttctttccctttgggtgaccgtagttttcaaggtccttcgcacctttctaactttcaaattagtcgcgcactgaaggtgacactctcgtggccttcgttcgacctgatctggcgggtcacatgcttcgaatcaacaacaatgttttcgccggagcccatgttactgttgaagaatacaccgctgccaccgcactcgatcaggaactggctgcagccgaccccgttcctggctcgaccgccgataccaagactaagatgacaactatcctcggcaagcgcttcttccctgctaccaagctacttgacttgtcgaagctgttggacgaccctgatctgcaagccatgggaatcttccacaacgtctctaccaagtccaaattcttccctgctctcatgaaggtctgggaactgggcttcaagactgtagctgaacgacgtgaagcggtcgaaagtgtcagtctggcggaaaacaacctcagcaacatcagctctgtgactaccctcgcacagtctttccccgatatccaacacttggacctctcaaagaacaacatcaaaaattcgcaggcgatgatcggatggcggtggaagttccgcaacctagttttcctcgacttgactgaaaacgaaatcagttccgacccgactttcaaggacaccatgctcaagtggtatcccaagctgcaaactttaaataacgtccaagtgcgaactccagaggaagtcgcggctcagaagaagacaccgatccccgtcctgcctcctcacttcattgacgaatctcaagtcggcgagaatttcgttcgtgctttcttccctggatatgataacgatcgtaacagcctcgtcagcagtgtctacgatgatcagtccactttctcgttgaatgtaaacaccacggctccccgggccactcaaaccgagacggcaggttggggtgaatacatcagaaagagccgaaatcttgacaagatcagccatctttctgcacggatgtcacgatccttcaagggcattgagaaaatccgtgaagttttcaatgagctcccgcccactcgccaccctgatcttattgcaaaggcagagcaatggctcattgaatgccacccagtccctcatctccccgaccctactggacagagccccactggcgttggtggcctttccctcatggtgcatggacaacttgaggagagcattggtggcaagattgagatccgaagcttcgaccgaacctttattcttggccccggtaacactcccggtggcatccgagttgtcagcgagattttctgcctacgcgcttacggtggacacgaggcatggtcgcctgagatccaggcactttcccaaattcctcagattgcagctcccgttcctattcccactgcggctcctacaccccttgcagtccccgcagctgtcccaggtggcaatgttcctgagggatacggtttgccccgacctggaaaatccgacacccagctccagcaggagcagatgatcactcagatgagtggcaagtcgggcatgactttcgaatactcagagatggccctcgcgggtaatggctggaatgtcgagcttgcttggaagaacttcgaacagctcaaggtaagctaattccgaggatggctccctgatttaccaaggaatgataactaacgaagctctacaacaggcaaccaacgcacttcctcccaccgcttttattgctccggcgtgagctttcactgtcatctggtttcattgaaatcttccacgtccactcccacttccattgttgttagctagtcagttttatctcgggagtggttctgtggaagctaatgtatctgatgtgaccatacttttttttacttgcatggcttgggcgaatggcactggtttgatagtctccaaatctggacatgggccactaggccagggacttttatgaaaacccaaaaaaaaccaatcaaatgaatccccttctaatatctcactcaggatataagtaacaaactgtagacctcagaatcacaagggttgtctctaaatacccaacaaaccagccctgtaaggattgcggtagttgcggaagatgccaagctggcgcgctagagccatgcgggccgcgatcaacatcccccattcaacttctccctcccacgaattccgcattggcctcacaaaaagcaagttgagaccaagggcaggatgattctggtaggctgatggaatgacgatcactgccacaaccaccggccacatgtcgccaaacgaggaaccaagcctcgacgccttggatgcgggtgcggaacaattgacatttcgttctcactgttgtgtatgctgacataggagtacatccagtggactacgatccgattgaacacttgaatgccgttttctcccatccatccaccctctcctccgtttctcagattgccgacgccctgaacaaatgcgaagatgagctggacgatgacatcggcatgctggtggaggagcaggtcacctccaatgccggtagcgtggaacgaatccaggcagctaaagacgacctgtcggagctgttcaagaagatcgatgacgtgcgtgagcgcgcattgaagaccgagcaggcaatcaccgaaatgacagccgacatcaagcaattagacaacgcaaagaagaaccttacactatcgatgacggcgcttaagcgcctgcaaatgctgactacggcgtatgaccagctccaagctctcagtcggacgcgacagtatggagaatgtgcacagctactccaagctgtcattcagctcatggcccatttcaagtcgtaccgatcgattgaccaaatcgcaatgctcagtcggaatgtcgcggacatacaacgagacctccaagagcaggtctgtgaggacttcgagctggccttcgccaagggggaggtaggctcgaagcgtgcgatgctcgcggagtcgtgtctagtcgcagatgctctgggtgagcacgcacggtcccgactggtgacttggtattgcaatacacagctccgcgaataccggcaggtcttccggaacaatgaggaggctggatcattggataacatctcccgccgatattcatggttccggcgcatattgaaaatatatgacgaagagaatgcggctatcttcccggcttcgtggagggtaaatgaggtattagccaatgtcttctgcgagggtacacgggatgatttcaagggtatcttatcccgatctgtacgcagcgggcagacgatcgatgtgaatttgctcctctcgtgcttgcaagagacactcgatttcgagcattctcttgagcgccgcttcgccccttcgtcgcgtgtatctgttgatacatttgcctctgccgaaccgcctgtattcaaagagtcaatttccgaagccttcgagccatacctcagtgtctgggtcgaggctcaagacaaacaactcgcagccctgctaccgaaataccgccagcaacctctcaaagtaccggacgaggagttcaactcgcatattgtgatttcatcttcgactgagcttttcactttctatcggcacgctttgcaacaatgtgctaagctttcaaccggtggcagtctagcagagctggccaaggtgttcgccaaatatctagaccgatacgcccaggaggtccttctcaattatataagtgaacgaccaacacttcacacgccgtctagggtgccatcggtagaggattacgtctcagtcttgaacactgctgattactgctatacgacttgctcccaactggaagagaagattaggggtagattggatgagaacctgaagcaatccgtggatctgcaaagccaggcggactctttcatgggcattgcgtctgctgcagtacgaggccttgtgcgacaagtcgaagttgatctcgagccctcctggcgcgaaatgcgcaatacaccttggtctaaaattgaggcagtcagtgatcagagctcatatatgggcgagatgctctcccggacgaaggagaaggcaactgggattttacagttgttgcataagcagcaatatgcgcgtgccttctctgatcatctggtggagctcatgtcgagccagttcattagcaatgtcttccaatgcagaccgctttcagaaactggcgcagaacaggtatgatgtcccttcggcgatgtaattgtatatcttactaactccattcatagatgcttctcgattcgtatactctcaaaagcggcctttcatccctgctacctgctccagcgcccgccggctttgtcaagcgtgtgaacagcagcttcttcaaaatcgaaactctcctcaaaaccctccaggtccggccgtcaccaccggaagctcttgtgcaagcatacctcatccacattgctgaccgcaacaacaccaacttccgcaaaatacttgatctcaaaggcatccgcagccgccaagatcaaaatcaccttgtggagctttttaatcttcaccgtgcatcagatcgctatgcatccagccttcaacagagcaacccaatactcgccgctctccaaggaccatctactaccaccaccggttccgtatctcaaggcctaggtctaggcagtgccgccgcggccatgccctctcgttttgacgcctccatgctcggctctgccatcatgtccgctgccaaagacggtgtcgaccgcttcggaaaccccaatctgagtatgggtcctggtgcggctggggctactgggacagctacatctacatctggcgtaaccagcccatcaggcaccttatccccttccctggccagctccagcctacaatcgaatcccatgcacacgccaacagaaagcaccaccggaaatctcaacgagaacctcaagaacattggtaaattcttccgccgcgatctcggcggggttttgggggcgggtgggggggnnnnnnnnnnnnnnnnnnnnnnnnnnnnnnnnnnnnnnnnnnnnnnnnnnnnnnnnnnnnnnnnnnnnnnnnnnnnnnnnnnnnnnnnnnnnnnnnnnnnnnnnnnnnnnnnnnnnnnnnnnnnnnnnnnnnnnnnnnnnnnnnnnnnnnnnnnnnnnnnnnnnnnnnnnnnnnnnnnnncgccacggcgtcgggggttttggcggccggttcgggcggagcaatgaggatggggtgtagcttctccccatctattttcattacgtcttctatttttttctggttctgttttgactcgggcgtggagacaccattgtaaaaatgttctttgccgtttcggttgatttgtccgagccattgaatgcccgaaggagtagcttgtttatgtatcagagcgccctgtgttgaccttatgttttgcagttgtataccacttggattgaatgcattaaatgcgacatctgtgttatttggatctaatttgtctatattcttctagtacacatatcccctggtgtgggacagtttggttcgaaaatatttattctcttttagtccacgtccttctaatgacatggctctacaaaatataatatctatatctcttctccatagtcacccacaacccctcccttttcctattccaagaaaaccccaactcggcaaaacatgaattccgcaacctcccaaccccggggacataccctccgcacccaccgacatgtaaccctatacgaagaagaacagggctgggcacaaatggaagcactagtatttaaagtggtgcagaattcctcgacaactacgacgcatccacagaccgatgctagatcttcgagcgcaacggcgtttctcggccgtatagtaatatgcaagtcagaaacagactacaagaaatgagatatagatgaaagtcaacaggtgagtttcagctggcctctcacccatttagagttaaatcctctaaaatcttgggtcaaagtcctcaattatagtaggaccctggacggtatgtcttaaacacatgtgaaaaccctgcgccaacctgagcttctgcgtcctcaataaacgcaggagtaagcgtgatacatccagtacatcttacaaaaataatcagacctcaaggatgattcctctttgcgtgtacctgcggtctgctcctccgcctcttcgcgcattcgtaagagatctgcccggtttttgctcataccactcgatatcctctggataattcgttacgcgccctaggaatcgctcaagaacacaagcaacatatgcattctcaaaaacccttcctctttgaggactagcgagtggggtccaataactttagaaatatccacggattcgttccagagcgtttgcgttgtagatcgtgcgggtctataccccgtccgtacctttttatgctttatagccggtggcgtaccggcagagggagtctagaagtagtgggtcgaggatacatagcatcaatttgttactacgtgggctaggcgggcgcgtacatctgcaacccctctctagcgcggttataacagtagggttaacattcgatctataagcgacagagatggcaggtaggaaagaatagcgaaaatgcgataatcaaaacaaattctctgcgtaacgtcccaagattcaaccactggcgaatgaggcgtttgcgccgctggtcgaatagtttgttatgcgagtctagataagcagtatcccattattcctagaaatgggaatcgagttgatagcgcatgaaacattaggagaggagtcacatatactgtatagatgtcgagtggaagagccccctatgcgggaacccgacgttagatataagggggcattgtggcgcatatctacgtcacagaaacggagagagactgactgaagcattggagttatcaagtcctttggcgatgactctggtgggaacaaatgatggccttttccggactgaacctaggtcccagggctggtcaataggttaaagaagggtgtaaattgtaggatagctgtggattctcgaaagacttcttctgtgctgactgtttcaggctgcctcttcgtctccattcagggccttggtgtgtaagagtctttggtacctttcatattttcttaactacatgtgctttcccaccttctaccgaataggacaacaagctataggaatagatatgttcccctcccatcatgatacttctatatgtagtccccggggaggcgcccgaaacagatcgtccaacggggatacctagaggctagaaccctgacaggtttcgccgaagatccggcaggtgggccgggacctggcggacaatgcttgtgacaacaccgtaatgcttgctttattcattttggttcagactggtgaaatagatgttcatacttttctttactcattattcagccttgaaagtattgtattagacgatcaattagaaccaaggctacagggctgtagatataaagaccaaagtatggaacaacattccatggtctcaaccagaggtctccctacgcgtgggtctcttctccaacgacacattattctacttctagcgattttgtgcagagaaggccaccgcgaggagaagattttcctattcgggtcgttttcgttttcgcgagtatcaactgaacccttgatctccacttccttctgctggacaattttattatgtggggccgatttcatctaaatgatcagcatccgaagcaataaccgctttggtgcagattctggagagtctgaaacaccatacaatcaagggaccaatgtacaatgttgtaagcaattgaataggggcgcgtagctcatacattgccttctatataagatgggtagggagctgtcttattctctgtttccagcaataccagcactccatcttcttcacccttccacttctctttttttgccatgtttcccatcgccgttttagcactggttgctaccgcccaggcacacacagtcgcctggaccaaaggcatgtactgctctgggggccctgatctttctaccgtcaacctcaataccaacacagcagtggggcccctttacaacctcgccaaggaggactggtggttccaacacgaacgtggatgcgatgcagcaccgccgcaggacggcgaggttctcgaactccctgctggtggaagcttcaccgtcgagctcgcccataaccgggcgcagactacactgtcatacggtggacagtacgcctctgattggccggatggaaaggatcacccagaagactgggcaggtcctggaagtccgccagactgcatccaggatgacggtgcaatgcacaccaacaaccaatccatggctgctggtaccgcgtttgcgatcagctatcagtcagatctagccgatgtcacaatcgacaacttggccgtattcacggtcttggagcagtaagtatctttcaagagatgggtgcgtgaaatgattgaagttctaacctacatcttaagcaccccgtggaaacgtatcgctacctatgaagttccagcggatcttcctgcctgccctgagggtggctgcacctgtgcttggctctgggtaagtggatggatcaagtataccacgatataaactaacgcatttgcaggtgccgaacggctgcggacaacctaacatgcaagtatatgttgtcacagtgtaggattttgactgctaactcgaaaactaggtacatggctggctacaagtgcaatgtgacgggctcaacatcatccaagcaggttgcacctgctcaagtcgcggcttattgcgaagatgactcgaccaagtgtgtcaagggcgccaagcagatgattgctttcaaccgtaagatatttgaatctttagtcgcactttttttatacagttgactgactcgagcagaacaaaccggaaacaacgttcaagtgcccaatggcaagacaccgatgtacaacacggcctggggttgggaatcaggtatgtgttcattccggacgactcttcagcaatgataaaaagtaatgacaaattcttacatcgacaggtgcccaaaatgatattttcgtgtgatcagggccaggtagtcatagcaagcagcttgttcatgaggtgattgtcacgatccacatggatcgctgggtcatatgcttcatgtttgcttgctcgctcgtttgcttgcttgtttactatatagtctgctggcttgtattccatagattgtttgttagatagccaagcgagaaggttggttgttggcaacgtttgcaaagggacagctatattaactggctgcttcctactttgcaacttgcttcttctttctctctatcttagttattttgaatagaatgcactctgcttcctttgcaagatctggcacgtcacagtggcgaggaaatacaggacggaagatagaagggaaatgaggaatattttataaggatggttgaatgatggacaggcaattaaatatagtgtttacctagtcgaatgcagtacttgatcttgttcttcctatagttcctcggtaatctctatgggagtcgggatacaccagctctatttaagcttaatgaactaaaatatgtcgtatgtcttattcagtacgccacaagactgtatgtacagtgtttacctattatatactaaattccatcaacggcttgaattatttccaaacgtccggatatattgggattctcccgagcccaaagcagggccatgaggctcggaacctcacattaggtaaatgaaaggcagagaagagtacgctgagcccacaccaatgcacccgctttcctcgtaatctagaggatggtcactcttgactacaattacccgggagaagatgaatttgaaggagattctggtgggattggatccctatctgactacgccatgctgaagaacctacttgataggtgttacagacgatgatttacctacccaaagtcccgttcgtattgttgcttctagcctctttggagcgactatatatagcgggggtgtatgtttgccgtgtacatatcctgattgaagtaccaaaaaatcttgtttctgtcttaataaatcgcttccctcaactgaaaatgattggaatcgaaggagactgggatacgccgccaatggataaagagatgtacgacaggacttcagaaattagatgtaccgttccatatccgtcatgtgatatggaagactggcaacgaggaagagaggtagcagacgaggactattgggccaatgaggacaatcttagcaaggagcattcgtctatgtagatcgatagctgggtattgaggctctaagtagcattgttgccgaggtaaggaggaactgtcacgtcacgccacgaacgtggtgtctttcgatttttacccgaatagtccacaggaactcatcgcgccacgatgtagctacgagacagacacaccttcatattacctattgtacactagtcaacataccttccactgaagttcacaggacgaccttgcaagtcccacagaggaccttgaggacttctaaggaagctatctcgtcgcactcccccccctcttctcttcactcttacgacttacacgcacgactaccaacatatctcataccaaacaaaccatccaaaggatgagcaaataaatgcattggaacgaaaacatacaatgtctattcaagggtcatcatcgaggctaacaaaaaaaagcacgaatccatcatggtcacggcgcccctcctagaacttcgtcctagaacgaagctagcatgggcaacatgaacctgttagatccgttcgcaagagccaggcccgcgatcgtggtctcatctcatccatcttcgattcatgactctttcccattgtcagcgcaactccccacacaaaccccggtgcccatggaaaaataaaatgggcgacagacgtgaaaaagcaatggaaaagcaaggatcaaggacccgaaacgtgtatgcaagagggaaaaaaaaaagttggacaaggcgcggagggattggaaacaggattacaggagaaattgggaaatggaatccgagaagacaaagagaaagaaaaaaaagagaaattgatatcttccaggttttcggaggaaacgccattgcaaagcataaagaaaacaaacaggttccccgcgttaaatcggggttaaggagaggggccccttcacatggtatcataagcgaagtcttcatcaatggcctagcatcaacccccatttacggcatggaaattatctccgaaacccttttactgcgaagcgcactgcacccgctcggcaccgccgggcacatcatcttcatcctcgtccatgccggtcgcggccgcgccgtgggcgcgggcctggtcgtgctcgttcgcggggtcctcaagctcgaaatcctcgaccatagcgtcggttgggggcacgatcttctcagagcgaggaggaaggaccttctccaagaggtctaggttctggagctcttccttcttcgggaacttgacatcgaacttgatgtataggttgccgtggtcgtggtggcggaacgagggcataccctggccgtgaataaccttgatggcatctgagaggaattgttagtaacaagtttcacaatatctgtggggaaaagcaaggcaagtcacataccaggaacgataacctcgccagggacaatgttcacggtcaaccaccgctcatcaaggtgttcaatgtggatggcaccgccggcaagggcggtaagcaagtcgatctcagcctggtagaacaggtcgtcgcccttgcgctggaagcgggggtggggcttctgctcaatctcgaaaacgacatcaccgggcatgacaccaggcatctggtcaccctcgccgcggaattcaatcttgtggccgtcccgcacacctttgtcgacgtgaacgtgaagcaccttgcgctcaacgacggttttcttgccgttacacttcttgcagcgatccttatcacggacgatctcgccctcgccgttgcagtcggggcagacggtctggaagcgctggatcatgggacccatctggcgcatcatcgtcttcataccgctaccgttgcagcccgcgcactccttgacagcaccttcctttccgccgcggccatcacagccactgcagatgacggacttctggagcgccaacttggataccttgcccttgtagatgtcctcgaggttcaccttgtgcacgtggtggattgtacgggccttcttagggccttgatcacgcatgccgccgccgaacattccaccgaaggggccgccgccgccgccgccgaagaattgagagaacaaatcctcggcgttcatgccaccgccaccgcctccgtgctccaggccttcctcgccgagctgatcatagatttgacgcttctccgggtcgcaaagagtctcgtaggcgtgcgacagttccttgaacttctctgcggcatcgggattgttggtgttcttgtcttcatgtgacgaaggggtgtcagctgaatgtttcctaaatttgctattggagtctcccgggttgttacataccaggatggtacttgagagcacccttcttataggcagtcttgagctgagcctcagtagcggtgggagcgacctaaatgaaagaaacaccgagtcagatttcaagcacgaatcacaccggtttcgagaaccagccaagtgtagctttgcatgggttaacataccccgagggtgtcgtagaactttgtttccttgaccattgtgaagtatgcgggggatcagaggcgtaagaaagagaatcgatattaggtattcccgttggaatccagaagtgaagcgggagaatagaggggaacaaaggcgaaagtttcagagtgcttttatatgagaaatgccaaacagacaacaattgcggttatttgaagtcctggctggggggagatgaaaaagtggagggaagagaaagggcgagatggtttatctgaacaatagtcgaagccaaaaaaaggctgagtaactttttttacctaggcgtatgagactcgtaagattacccactcaattaccagggcaactaaggattgacggttttccactgcgttttctttgtctcgctttgaggccgattttacagtttttcagtccagaatcgacaatttgctctacaatatgggctattcttcgtctccagctcttctggtggcttctatgtacatcctgaattggcccgagcgctgattctacgggattccgcggtcttcgatggaattcgcaagtcttctccgcgcttccatgttttgttttattacgctgactaacggagtatatttcacgcatcagaggaatgatcgcactccctaccaaatggctgttaaatttggcgatttattggcctcatggcatacacattacatggtttttgcatattgtttcctgcgtgcaatccctgtgtaccagaaactcaacaatgcagaaatctcgaagccctcgccactatcgagctaaaagccacccttcagccacatatatcttatcgataagccaagaggcgagggggaaataaaagctcttcaaggtccactcggttccctcgtcatagaggggttcggaactctccgaccatgccgattatgccttggagtagatttccgtatctcgtagtcttcttatcttgcccctctacttcgtagctcacactcagctcacctactacacactccgaaatggaacaagatcttggattcattgctgccgtcgaagaggcgaagcagggcctctctgagggaggtgtgccaatcggtgctgccctagtctcgaaggatggaaagatcctcggccgtggtcacaatatgcgcgtccaaaagggaagcgctgtcttgcatgtcagtatagcatgatatactgcattgatatcaattgtcgatctatatctatacccaatattacagcgttcatagactaccgctaacacacacaaggccgagatgtctgccctcgaaaactcgggccgtcttcctgcctctgcttacgagggtgctactatgtacaccaccctctcgccctgtgatatgtgtaccggtgcttgtatcctctacaaggtgaagcgcgtcgtcattggtgagaacaagagcttcatgggtggtgaggagcttcttctcaacaagggcaaggaggttgttgtcttggataatgccgagtgcaaggaattgatgaccagcttcatgaaggagaagcctgagctatggtatgttgtgtttggtgctcgatctatcgcaatgcgtaaagcggctgtcggtctgctggcagttgtgtcgaggagtttcggttgtttcatgatcgtcaatactaactgtagtgtctgctatacaggaacgaggatatcgctgtctaatttcataaggcctgcatatatcatagccctaaatacccgagaattgaaattatccacgcccaaaatatgtgtttttagatccaatgtagactttttatctgagtcggggaagaagccgaccgcttttaagattcaagaaaggcacaattatacggtcaaacggtggatttcctcaaagaagaacttgaggttctcggggtcgacgaatggagtgacacctacgttgagagacagttagttagatggcatacagcgccaaatcataaggttcgacttaccgtggcctaagttgcagatccatccctgcttgcccttcttgaaaccctcgaccatgggctcaacagtggcagtaatagcaggaggcccaccgtaaagcatgccaggatccgcattgccttggatagtcacacgaccgttggcaatacgcatggcatcgccggcatcgtgcagccagtccaagccgacaacattatagcccgaatcgcaaaggtcatccagagcgtaccaggcgcccttagcaaaaacggtcataggcacaggctccaagcccatctcctgcagccgcttggggaggttggcggaaatgtggcgcaggtaaggaagcgagaaggacttgaacgagacgggagacagctccccggcccacgagtcaaagacctgcaccagctgcgctccggcagcgacctgaagtgcgagatattccacacatatctcggcaatcttctgcagaagagcctgcgcctcggcagggtacttgtagacccatttcttggactgcacgaagagcttgctgccaccgccttcgaccatgtaacacagcagggtccatggtgcaccacagaagccgatcaggggcacccggcccttcagcttgtgtcgtgtaagggtaattgccttatagacgtagtccagctctgctttaacatccacattcttcgccatcacaatttcgtactgcccgtccgtcggagagtcgagtggcgcggggaaatgaggtcccttcttgtccagcatctccacgaccatgcccatggcctgaggaatgactagaatatcggagaagataattgcggcatcgatgaggccttcataacgctcaacgggctggagggtcaaggttgatgcgatttcgggtgtgcggcagcattcgaagaagtcacggccgcccttggcctcatggtattcggggaggtatcggccagctgttcaatagaaaaagaaatttcaatcaagtgtccttgggaacgtagtgcacgaataagtctaactcaccctgtcgcataacccatatcggaggacgctccaccttctcacctacgatttgtcagctccggccaaaactaagatacagagtaaacataccccgtgcagccctcagcagcaggtcgtttttcaaaggctcaaattgttcctgcattgtgttggtgggatatgcaagtgcgatggaggggggaagtgggattataagaaggttctccgggtaccgcggcccgtgattatcggaaaacatagtgacaacgctttatacccgtagcatcataagttcgttttcttcccgaggtctgtttttgcccaaaaaaaaaaagagagagagaaatgggctatacatgggtattttcatgtttattcgaatataactggaatccgagttatcacatccatgaacatatttgtgtgtttcgccattggtcatcaccggtacaacttgtttcacagaggttgatctatccacccttctatatcaatatatcaattaggacgttaccccaagataccctgttgccggtcactacgatcatagtatgacagtcctatggttactccgtagctcacaggtcaggccactggagctctcgggagcttgaagacgctctagcctgtttctaaccaccataagtattgctgagaaccatgactggagttcgattagacaggaccttttgtgggatatcttcggtagatctaggctattacgataaattattgatgtcgcagccctcgggccatcctctcagggtgcactctgacttactatttaccttgatgtgggaatggtagatataaaagcaatcatatctccccttgctgaccgaatagccttcctaagagaagattagatctctcgcatcttaggacctcttttgaccacacagtcgaggcaccactcattcgtaatggctattctttgttgcataccctaatcaatctaatcaagatataaacccaaagaccagggtcaatctcagcaatatcctatatgacaccctctcatgcggacttgtcaacctatatcttgctaaagacagtcaaaacgaagatggtatgtgtgaaaagatactagaaatatatattttgatctaggtgaagtgaattttgcggccatgcttcccctcccctcctttggacataatggagattgcttgctgcattacatatgtttttagaaatctaactgatcatttgctgtacattcataaaaagcatgctttcattcgtcgtaatcacctctcttccgcaggttgcccaagttgtacattgaatcattgagctctttctgctctttctgctctattatcgtaggcagacttgaggtgccttcggagttgattttgataaccatcgagtcctctacaggaatccactttccagaatcaagccggaatgtttcgagaagaggctgggaagacgacttccaagcacatgtcgaatcggattggcgcaaagtatccacggcaacaataatagagcctcttgaatcaataccgaccagttcaagaacgtttcctgacagctgaagtgtatcttggtgagttatcgtgttgtcactttcgagagtgtagcaaagaagttttgaagacctgctctcgacgttaggacaaatatagatatcatcaatggttgttagaacgtacccatcaagtgcaacaaagatagccttcacagaatcggaattgcctgccgtaggcgcaagggaaacatcccaaatgccgcgcaccgtagtctctccctccgacccgggaagctgaattttttgtaaaatctggttttcgagccagtcccacacaagcagatagttgtcgccaccacccgagatgagaactttaagttcgaaggaagggacgcaaagactgctgacaaatgaagtgtggccaaagcagaattgctcaattacatgcgcttggggaacaccacgagagacacggatgtgctcatcgcgatctccagtcaggatgtaactccgcttgccaacggccgagtctgcaggccgggtcacagagattaattccgtcaacaacgaaacgtgaccaatgatgacttgatgctcgaagttcagcacagcccgttctgcttggttggtcttcgacagagcagcctgtcgcatttgttgctccaatgattcaaggttgcgttttgtgtgcaccgtgaggtttgtggcagctggctcatacggcttcgctggagcctggaccttcacgtactctccgctcggaatgagtgggaaagtgtacacatctccgaatttgtcacccgtcaagatgttgttctcatcgggagtcagggtaagtgcagaaagcttcttgggcattgtactatatatgatgagtttggcgaacctgcagatagaaaaacagccactcaccgagcactcaattgttggagtttgccttcgttatccaaactcaggactcggacacatttgtcctcagaggtcatgatcactacatatttgccgtgggcaacagtcaagagaggaatattggtccaggagttggaagcgtccttgtccgaattcttaggatttgactccaatttggcatccttctgttcctcggagggtgaagacagcttccttcgcttttctcggggaccttggctttcagatgcgggagccgcgtcagagcttttatcatccgcattcgcatctacggattgaggccacacatccaggcgctgaccactagttgcatcgtaagagtagagattgcgtccagcggtggcaataagaatatccgattggcctgctgactgcctgttgacatatcgcagacactggaatgggtgttggagaccggccatgatgaagtctttgattcacagagtgaaaatgatcaacgatctcacaaataaaccaattgcgtactactaattgtagtcaagaagacaacaaataacagtaatcgctcccgagattcctctgatcgaattccggccatgtctgtccatcatgggcgggtctactttcggaaccacgtgacccactagcgagcgcaccaccaaaattgattcccccgaaccgcacacctcttctttttttctcttccattaaccaccacaacaatagactttcccttaaacaacctatcttcactgaaatcaagaagaaatggggggcaagtccgcaaccaagtccgcttactttgagaagctgcgtgctctgttagtttctcaatggcgcctagcaattgactccattcaaaaattctaacaatcttctgttatagtctcaatgagtacagcaccatcttcatcgtgggagttgacaatgtcagctctcagcagatgcacgagatccgtatcgctctccgtggagaggccgtcgtcctgatgggtaagaacaccatggttcgtcgtgccctcaagggtttcgtcactgagaaccccgagtgggagcgtctgcttccccacgtccgtggcaacgttggtttcatcttcaccaacggtgacctcaagtctatcaagactaagattcttgccaaccgtgtcgctgctcccgctcgtgctggtgccgtcgcccccgatgatgtgtggatccccgctggtaacactggtatggagcccggtaagaccgccttcttccaggctctcggtgtccccaccaagattgcccgtggtaccattgagattgtttccgacctcaagctcgttgaggctggcaacaaggtcggtgcctccgaggctaccctccttaacctgttgaacatctctccgttcacctacggtatgaccatcgcccaggtctacgagaacggtcagtgcttcggcgctgaggttcttgacatcaccgatgagcagctcttggccgccttctcccaggctatcgctaccatcaccgctgtctccctggctgccaactaccccaccctgccttccgttatccactctctcatcaacggatacaagaaggtcctcgctgtcgccgtcagcaccgattacagctggcccgagattgatgatctcaaggaccgcatcgccaaccccgatgcgtacgcctctgctgcgcctgtcgccgctgccgccgccacctccggcggtgacgcccctgccgccgcagctcctgctgaggatgaagaggagtccgatgaggacatgggcttcggtctcttcgactaagcgccctctcgacgggatgcggatgccatgtattagatttacttgaactggcgcttgaaatagcgaccaggaatgaaaaaaacatgtcttggcaatggatttccctcggaaacctaggactcgtatgatggacgtagctacgcccattgttcgtttccacggaattggtgagttttcaatcccccaccccctttttgctcctaccccttgcacacccaccacctcatatcaccctggcggatgattataaatttttaaccccgagcatttacgcccccctccggggcgctctgaagattaaattaatgcaacaacaacactctaattttttgatgacgccatgcctttaccctcacacatgcttttgacttttaacacatttcactgaatttgcaaacaattgctaactcgtgacaagattacagacgctctccatacgacctgcgatagtagtaccgatatgttgtcgccgtagacaattgtgtagttgggtggctgtcggaaatcctgttcgctatctctatttgtgcagctgccgtaatagatggttgctcaatgaaaaatcgttctctcttcgaacttattgttcctgttcgtaatggtagccaccagcgtgtaactggttaacagtacaacataggattacgcatattttgtctagcaactccatatgaaaggtacataaatccaacgtgcataacgtcgatatttcactctccaactagacactccgtactccgtggtggatgggaaatgtgatcgatccacttgattatgagacactctaatagcccaacttaccctcgatcgatcaaacggcattccgatcgctgctgccccggatcggtcgattcccgcggtggatgcggataatgtattaaaatgaccttgtaggaaagggaaatcccatcacggtctctatttctcagagacgagatccaatgactggaatgagaggtcatggcgaggtctcagtaaggcatacggctcgtaaactacatgcggtctttcgcttgctttgagaactatgccccttcttcctcgccccgctgagtgaagccgtccgctgaaaaacagatcctttcaatgcaagttctagcgtggctgtactagaggacgcctgggacatggcagaaaagtggatagagcgcgggctcgttctcaacggcttgccattgggagttgctgggaattacggtgtaaaggcggccgtttctagcgccagaagctgttcttttcggtgtcattttcgacaggtcttaagttttatattagtgaatttccttttcgcgttagctttgccttttggggcttagcgtcctcgtaacctcccgacctcgggaggtccccgctgatataacccgctctttgttgcccaggtgcctaatatcggctttgttagaatctgcaggaagtgagacaaccttgaacaaagaacaggagccacctcatactgctaactccaagaggaaatgacaggagaagagttcccccaggcaacctgcgacagcctgagcaattacgcgcccaatctgacctagatagcctggagcgaagagctgaagaaagagacgcctgtaatacaagagcacttcaaaatcttttgatattatatggaggcacaagctatttattcgaactctgagcatgtcccaaaataacctcgtgctttgacagacgagatatcttaacagaccaggtagtgtagcaaaaaaaaaaaaaacaattttcgcatccacaagttacgtccgctccatccactgctgcagaacatcagcaacttgcaaactatttttctccatgaacaccaaatgtccatttccatggatgccgatatccgccagctggagatgttgcgccgggacacctgcctgttgcagaaaccggactgtgcaccagtcatacggcgcgtggtaagacgattcggtcgtcaggaccaggacgggcacatgggcaagattgacgagctgtctcggtgcgggggaatcggcctggattacgcagtcggaatacagcgacgagttggaagggataacatgcttcacgaggtcgaccggatcggccacggcgggcgaataggttagggggatgtcagtaagcccgtaggcgcgcgtggaggagttgctgaagattgcgtcctggaacggagggccggtgggttcgatcgagacgatggagtgaacgagatccgggcgcacatccgcaatgagccagggcatacatccgccctgggaatgggagaggaggatgactggggatccgatggtgtcaagcagggcggcgccggcggcctggacggtcgactgctggtaggttgctgaattgaggaattcgactgtcgaggaatagtaagtgtcgaaattccggtcgcccatgacgcccgtcccgttccattgggtgtgcagggacgcttgccgccagaggttgtatagcttcggtgcggtaaagcgctgctgcaacacctcggcactgtaggtgctcagcgttccattgccagggaaccaggcactgcggccgcggaaggtttgatcgatgatatagcatgcatatccctgagagagaaagtaagacgcccagccttcccctccatctggcttgttgagccaattctgccaacatcacggttaacctctaggaagggagagaatggttcaatgatacgtacggtgcctgtttgagcttgtccatggatgaagacaattggatacggcttggtaacacccgcggccggtgtcagtttttccacgtacatctgatccgcaaagatatgttggccagcatcattcagaatatattgtcctccaacatacatgtacgatcgctgggctggcacctcaccgcaccagcctgaagccgcgacaattgcccagatcaataataatcctgtcttgatatgcattttaaggggatggccaggggtcaacgaaacgacaaggatcatcagtcaatttatttaccggatttcctccgcggtcggccttcttgttggcccccacacgggaactacatactaacggagagatggggagttcactagttagaagctaggaaatatctccgtaaatggatcctgaatccttcgatcttggaatttcttttatgagtaatgcttggaaaatggttgggaagtgctcccttatgaggaagtttctgtctcttctttccctcttgcttacttcggacttccagaggcttcaaaggccatggattctaccctcatcattctttgggtatttacctgggtggcaattggcttaattgtccttcggctgttagcgcggaagttgagaggataccagttcgtcctaggcgattatttcgcaatgggagcgattctctgtgctgtcatacgcctcgccttggttcatgttattctcatctggggaaccaacaatatgtctggcacattcagacgcacgcacgtttttacccccgaggacattcgtcgtagagagatcgcgagcaaattcgtgctcaccaatcgagtgttctataattcatagtacgtgcgttaaacggaatccaaggtcggctatttctctttctcatatttcttttagtctctggttgcaaaagttggttctgcttgatacctatcgcagactgctcaggcaacttcgctgggagaaggtcacgatgatctcctatattggtatattcgcagcgacgtatgtaaccgtacagactgtgactttcacggagtgtgatccaatcagtcattactggatcgtattaccggatcctggtatttctttccctcttctaatttctctcttattttcgtgtttcgttgaaccttctaaccaatacaggcaaatgctgccaggcacagctccaattgatcgtcctcggtatgcttccagtcggaaagatcggttcaatgtaatacctctaacattctagtttcctcaggtgtattgaatgtcatcaccgatattatgcttatcgccttgccgattccaatcctggttctggttaaacgatccgctgttgagtaagtctacccatatcaccatatgaatttcgttgacgagctctctccgctagaaaaatccagctagcggtcctcttcgccgtcggtctcttcatcgtcgcaatcaccatcgttagactacctcaaaacgtcaaaaatcccactgtacaagtgaacagaacgacttgggcatccgtcgagttgctcgctgccgctatcgtagccaacgctccggttctgtacggacttctgaagggacggagccaaaggtccaagtacgccgcatcaggagccggatcaactgggccgtcgtggcagggacttcaaaagaggtcggcaaacgagctcgaattagaactgcaacgaatcagtcacagtgtgggagggcctgttctcggttcaaagatatcatccagccattatttggagatcgatggcgggagtagtcagtcgttgactcgaagcctagataagtagggaaaaactcgtacggagtataacagaaagggcttcaagccgagctaaacgtgggctttatagtcattcggtttattcggaattgtccagtgtagcactagatgcccaatattattgctgatccccttttggccctgtcccaaaggtaagattcggtggtctcctaggtacggagtgcgctatgtcagcgactttcaatataagcatgtagacatgttgcgtatcgaattatctgtcaatcccccctattaggaaatgacaaaagcgtaaattttacttctagacaatttgccatttgcaacatccttttaacgtgtggtcacctgtatcaatcatgctaagacccgctaagctaggaaaactttcccctctgctctctgcgttcccttctctctaagcctcgcaccgtaggtccatatgagaaaaggcgctagcaaaccgaagccaatcatgatgaacgccaatgtgctatttccccatccgtattcaagacgatcatatagagccggcgcgaatatagggaagcaaaaacccaagatacttcgcaagaattgactagaggcattcgctgacgccacgtattccctgtaggactctataacatactgctgtatggcttgattactgagaatcactccacagccaaacaccgatgctccaatgccgacgacgattcacggagccattgcttccgctgtccagccataccatgatagaccagctactaggaaaacaatccctgggaaaatcaagggaattcgatattcaggtgccgtctgtcctcgcttgtgtgtcagatacttccagagccagtcggtgactcgagcgccaccaggagagccgacagtatagccgagaacaatagcgacataatgaacgccactgatcaacaccgattgatgatatctctttgtccagagggaggcaaagctggtgaggacaaagaagagaacgccatcgttgtaggcgaggaagatagccatgatttgaatagttgactgagtcgccatcatccaacacgggcgcgcgagactatagcagagcttccttgccagtggttgattgtgaacatcggtcttgatatgaaaaaggcctgcttgtctccttttgtaatttgatggcctttcgatgaagcaacaaacgatgataagtttccggaaagaaaaaaatcgcatagataaccaaagcagcatcgaagatggaaacaacccagaaaagccacctccatccgatttttgtcgtgatgataccgccgaggatagggccaatagccggacccaacaaggcacgaaagttgcgatcgcataagaatgaccgcgctgctccggacgccaacagtctgccagcaccagcgctgtggttgcaaactctgtaccggctcccaggccactcagaatccgcccagccagtaaaaggcccctggtgtgagcaaaggcgcaaatatgttccacagtatataccaggtcgaagacaagatccatacccatcgatgaccgaacacttcggccaagagagcgagaaccatcggtccaaaggcaaaaacaagcacgaaaatcgagaccaccatgttggcttcgctctcactgatgccgaggccgtcaccaatattgttcaaggcgggtgccagcatggatgcactgataaggatcaccatgccccccatggagcacagcaaagtgatggcccatcgcttggacagggaccaattgaattgacatgcaggatcgcctggacccttccattctaccagtaattcgtcgcttgcaggatcgggatcgatatgtatccgtacttcgctcagctcggatgtacttggtttttccatttcatttatatgatcaatatgataatagatgcaatgaaaagcaaatcgttactatctacgaaaatacagaagacggggaaagcaacagttgatactgatttacactacggagtacctggccaggcttggttacaacgaacaaagaatagtcttccaaaagtgcaggggttagcagtcattcacgttgcttccggatcatctattgtccaaatgaaagagacacctgatctaacttatctaatctgatctagaaattgggcctcgaaactaactgttgaggtgcaatagctgcctgatgcatccctgctaggtccctgtcgtcaatcgaatatgattcgcccaagtatctttgccattactagcaaaacatcgaagcttactgaacacaccgtaaaagattcttattttgattgtttccttacagttggatgtgtgagtaaagacccgcgaagagatactattgttgctacttttcgaaggacggttcaggaggtttaagatacggccggaatcatgtcggccctcctctcgaacatgatggtttgctgggccttcgggatttcaaatactggatttagacatgattctgaacaaacatttggacggatattgtgttggaagagagctaggccgaatgccttaatattttggcgctagagctctggcgaaaggaatcgactatagccttcttactgattgttctctgggatttcaatcaatttgaaacggttaagccaacccaatgatcactatttcctctaaatcagtatctaccgtttaactgttccatttggagctctgactagccatcgaaattaatttcgctctgtaacataaatgcagataaagattctataccatgtgcttttgctagatgagaaaccttgctgccattgcacactccctcgctacggtgacggtatgtatgtccatggggcatccagttgatcttcgatgtcttcaatgcgcagttatttgggccaaatgagaatctcacgtaagtcttcattgcatcacgtgccttctgtgtacccattaaaagatctatcgttccctctacgctttccgagtgttttcgatagcctcttcagttcataattatttaactaggcaataagtcctcagttatcaagtcttcaaaatggcccaaaatgaggatatcaacccacgcccattcaacccccgcccattctgtcccgatcccctagtcatcgagcctcagcaacgtattaagcagcttagagaatacctggaagatccggctcccaaaatgcaacgccacagaactaacattcaaggactcatccgaatgtatgagactggggaactcgggccccttgtctttcctggtcaggagacgatctggatctgtgaggggaagatcatggatccgccgcctcgccttgatgaccttgcgcacattattccacattatgccgtatgggccgaggacagtctctaccttctacctttgctacattttaataattcctaaccattcatctagggattatatcaacagttgatgcagcagattcctccccagataactaccttgaaatagtgatcgaaatagtgatgtggtatagtggcctaggattgatctgaaccagagggatgagtctccgtggcgcactggaactactatatctcgttgattatcgttgtcagtgcagtcctacataattagtcaaagtttacgatggttgccttcgaagagaacctcgcagtaggaagtaactcatgtaagactatcagggtgaatatataatctggaagcaatcctaacaaacatcgcttggccacatggaattaattgattaatcacaacggtgctattaggttactaagataccatattggaagcattcagttcgcctttaccaacttgataataaaagagccctacacaaggtggagtcacagtgcagacctactggctgaattccattttaccagaaacagctccagtgcactgaacatttccattgtaatacagcaaaggaaccttcgaagttcaagttcctctcagagcatcgccactgtaacagagtctaggaacaagaaggctctctcatgatatgcctgagatagcgtccgattgtaccttcttgtctcttttcggcacattttcatgtatacctgtgtaggtgcaaaaccaacgtctagggcaacgtataccttctgacctgatagaagaagtgaccggaaaactggagttgcaacgtagcccacgcgtggtatgaaggtgaccgccgtactcgtacttatgtgttggttccgtcacaacttccgtggatgtatagagaactcgattgtcgtgttcgaacgataatttgagcatctccctggatctagaacgggatgactaacctcaatcctaattcgtgtgttaggggtaggggaagcgttaataacagcgagcttcgcggatgcttgcgcggatgcgtaaaaccggggctccgagcccgtccgtgatcgttctcgggagcttctaatattttcaatcttgtcataactccgttccctcttcgtcttgcggaaagtagagctcgacacgtccaagaggaagggccctagctcacgcttgggcgctaagcgtaacggaactgaaattgttaggttcatgttcggtatgatgagggtaggaaacaaaaggataatggagggcagagcacgggatctgaggatgagtgacaagatattacttactcgaccatatgctgtagatattcaagctaggacaaataagtgcatgcctttgttgcttatacttgggtactcaggcgtatgaatcaacttcttccacttgtaagtataactcagaaccgcgttgccttcccggaacatagacctataatctctctaactgtacaggggttgagaaaaatacgacacagtcacacagacaaaagggagatgagaaaagacccttactatggcgtgctcggaataaatctccaaaaaaaaggggactcggggaccaggaatacggaatcccgagcgagaataaacgaggctatgttggcaagggcgagaaataaacgcaacaggaaatttgaagtcccacaatttaaccaaccgaatcactagtcaatataggtatatgacaaagttctcgtataaaacaagccaaacgcctcccgtctaggcaagacgaggctgaaatcgaagggcatctccgaggagaaggacaagaataatgtacgatgtacttcgtgtcgcggagacccttattcccatgaggacggttatgccaccataaccatgtcttagagtcagctggctcagatgaacggcacaacgccacattatttcctttttgcctcttcctctcggctgtttcttctcttgtaagcctctattatatccacaagtcttggatatgcgcctatgtaacccgtagcggcaggaatgtcttgcgtgatatggtcgaaagtgccaagggacgcactaggaagacttagcaagcaaccaaggtggaaaaggtaaacagaaatagttgatacgtctgctagtcttgtggcaccatgttttaagttaagggcgcatctctaagaggtattactccgtacggagcactgctttagtactttattatttacaatatcccgctagatgcgggccgacgagaaagctcgatgacgtgatttagatcttgattgcgcctttacaaagtggatgaaaagtctgcaggtgacagggggaaaagacctgcatattctaggtaagcattgagctatgccctcaaatcttggccgttggagagtcgtagctatgttgtatggcttcgtgtcgagggtttctctactgggctgacaaggttctgggaaagctggtcgcttacggagtagaaattgcgtgactacctccgtatgcaaagaggcaatggcctacggagtactccgtaaattttgtgtgcatgctcccctacatccggagtatgcacctaacagatagagtagcgccgagcccaaacgggaccccacgcgacacctttgactcaaatggattaaagatgaatggactactccgtaacgggtggaagggacgcggcagatgagcaatataaattagatcccgaggtccgtgtggagctgtaggcatattgctcccgaggtcttgccattagaaaaccaccgttgaagctatacacttatgtaaacatgatattcaaggcggtggccccgggctggaataaagttaatcagctaagaagattcttgaaacaccagaaaacccgccggagaacgtaccaccaaagcgtggaacctcctttgtgcctttcaccatctcttctccagattgcgtgttctaaacggtgtgtgattggtctttgggtcccactcgttgatcttcttggcgcaaacctcatcaggacgcgttgccattcgtcacccagaaccccttggcactaccgacagcttgtccggtttagtcctcggacgtttatattcgtcaaggttatgatgacatggactcccaggcgaggcgaatatcatgagaacaatgaatattccaagggcgatgcgtgatagtgcttaaaacaaccagcacataaaattcaagtatcccgcctcatctcgaccacggactgcatgcaaaaaaaacggatatactccacgacccgtcgtcatttctaccagaccgagtgggacctgcggatgtgcgagatcgtcggtggacccggctgccgcgtgaaattcgtggtttttaacaacgtgggctcgctttcagccaggttttgctttttcttgtgaattttctacctcaaacttgcacttgatacaagtctagccctcgtctaatccttgcatcccttgccggaagtccaacccaagcgagccaagcggaaaatttcaaatcttaatttgaatctggggagctcagatattgcgccatttgggatcgaatcacgcatccaaccttgtttttattttctttattctttattctctattccttattgtcgtgccatggaaagtgcatgatcgtctgatttgacattttctttttatactcttgatcgtcaccacatctctagggtttccatcttttcaagtcaccgctgccaacacacatagcggtcctggaagcgtcgtcaaatcccggcatttgatattgtcaactccggtctgtacaagcgtgaccatgtttgaaaaatggagcgaggccaataccaatattggccattccctggccaaggtcctcggtatcaagctcgcatatagagaccccctgggtgctaccggtgccggtgagaccgtcacaagaggagaatcggcattttctatgggcaccgtcgacacatactcatacaacgagcccgagccgacaagcatcgactgggttcgcgaggtcaccccgtccggagcccagatagccagatatttcctccatctgttccctttcctcacatggattaccaactacaacctacaatggctgttcggtgatctggttgccggtatcaccgttggagcggtcgtggtgccacaaggtatggcctatgctgaactggctggactgccggtacaattcggtctctactcctcgttcatgggagttctgatctattggttctttgctacgtcaaaggatattactattggggtgggtgatactgcgcccggtcgaaaccaaaataaaacattgctaacctcatctcatagcccgtggccgtcatgtcaactcttaccggaacgatcgtggccaaggtccaggtagaatacccagattacccggcccatttgattgcatcggcccttgctgtcatttgcggtggtattgttctagctttgggtctcctgcgcatcggattcattgttgatttcattcctctccccgctatttcggccttcatgaccggctcggctctgaacatttgctccggacaggttccgaccatgttgggcgagacggccaaatttagtacgcgcggtgccacctacatgatcattatcaacaccctcaaatacctccccacttcgacattggatgctgctatgggtgtcactgcctgtgcaatgctgtacatcatccgttcaggatgcacttacgccgcgaaaaagcagcctgctaaggccaagatgtggttctttatctcgactcttcggaccgtgtttgtgatcttgttctacactatgattagtgccgccacgaacctgcaccggagggataaaccagcgttcaagatccttgggacagtccctcgaggattccaacaggccgccgtgcccactatggatcgtaagatcatttcagccttcgctggcgaacttccagctgcggtcatcgttcttctgattgagcacattgccatttccaagtccttcggccgagttaacaactacactatcgatccttctcaagagtttgtggccattggtgtgagtaaccttctcggacctttcctcggcggttaccccgccactgggtctttctcccgaacagctatcaagtctaaagctggagtgcggacaccccttgctggtgtcattaccgcgatcgtggtgctcttggctatctatgccctgcccgctgtcttcttctacatccctaaggcttctctggctggtgtcattatccacgctgtcggcgatctgatcactcccccgaacaccgtttaccagttctggcgcgtgtctccgcttgatgcgcttattttcttcattggtgtctttgtcactgtgttcacttccattgaaaatggcatctactgcacagtctgtgtgtcggttgcagtcctgcttttccgtgtggccaaggcccgcggtcagttcctaggccgcgtcactatccactccgttgtcggagatcacctgttggatggcgatggaaagtacggatcattcggaactaacaagactccctccgacgatgaagaccgccaccgccgaactatcttccttcccatcaaccacaccgatggctccaatccggatatcgaagtggagcagccccttccgggtatcttcatctaccgctttgccgaaggcttcaattatcctaacgccaaccactacaccgattccctggtttcaaccatcttcaagaacacccgccgaacgaacccgcacgcctatcggactcgcggtgagcgcccctggaacgacgctggtccccgccgcggcaaggaaggcagcgacgacgactcacacttgccccttctccaagccgtcattctggatttctcatctgtgaacaatgtcgacgtaacctcaatccagaacctgatcgacgtacgcaatcagctagatatgtacgcctccccccgcaccgtgcaatggcatttcgcacacatcaacaaccgctggacaaagcgcggcctggctgccgcaggcttcggttacccgacacccgtcgctagtgacggcggcttccaccggtggaaacccattttcagtgtggccgagatcgaaggcagcgcctctgccgctgcctgcgccgaaatgattgccaaccagtcccacaacaaggctacagatatcgaatccggcctcaagtccgataccaacacaactgcacgtgagactgacggcatcgagaccgcatccgagagctccgaggtcatccgtgaggacaagttccatcgtgatatcacagacagcaaggcgtaccagcgtcgtcctaaggttgcgctcgtgcagggcatgaaccggcctttcttccatatagacttgaccagcgctcttcaaagcgctgttgctaattcttcggacgtgattccacacattgagtgattttttctttctacgtttcatttgctcttcgatttgcacggcatctcttttgctacccttttgcatcgattcaattgttcctctctggcttggagtccgatctgatataccccgatttgacctgttaatatgatgttgatgtttttattttcccattttcccctctgtactttttgtcacttagcactggctatattggatgtatttcatggcgttgaccgtgaacaacctgttgttgtggtatattctttcagcactattcccttgattcgtgtgggttgatttgattgatatgggtcttgtttattggcccttttgcatctgggaagaaacggatttttttgcgatggacatggttcctacttgatttcttcttaaggagatacataccctttctgatacctatatctgatagacctgcttggtgaatacatgtatattccacctcatcgcttgaacatagcctgtgtagtctcttgcctcacacccccaccctccgcgtaaccaaccatcaacaaatcagccttctgatctgtccgaatgccagagatctgattcataactcttccaagtctagccgcgcaatcctaattgacctgatcacatatggctccccattgctggatttatcctcgatgctgctggtggggagaataagaggattacaggctactgtccggctattgtccatgctggtgcaatggcttctgttgcttctatcattcggctgaagactgataagcaacttcttacgaagctttaggccaggtgggtaggagttatgggttggagaaatccaatattgtaggataccgccctgtaaaataatattgctcaaatagagaaatatatagagaaaagacgagttcacaacaagcgaggcatatacatagatggccgaggttcaactgggccccatagttcaagtactgcgaagtacgccgcatccaccagaacgtcaacctcaagtctttttcttctattcggatctcatttcccttctccagagatctgttcgaagtccttcaattcaaaatgactctgaaaccggtcaactgcctgagacgcccagcactacactgcagaaacctagccgttcctctacgccaatcaccaattaaaacatgcgcgcaatatagctctcactcaccaatgggctcaacaaccaccagcacacgcaaaaaagtaacaatccaaaccatccaaaacctctacaaaaagaacgaacccatcacagtccttacagcatccgacttccccagtggccatgtcgcggacacagccggaatggagatcgtgctcgtaggcgacagcctcgcaatggtcgcaatgggcatggaagacacaaacgaagtaacaatggacgagatgctcctccactgccgcagcgtaaaccgtgctgtcaagagcgccttcacagtaagtatatccatgcatacatatacaatgcctacgcccggccaagttaccacatctcacaactcgctatagatcgcagacctaccaatgggctcatacgaaaccaccccagaaaaggcacttacatcggcaatccggatggtgaaagaaggcgggatgaagggcgtgaaactcgaaggcggggcggagatggcgtctacgatccgcaagatctcacaagcggggatccccgtcatggcgcacatcgggctaacgccgcagcggcagcactcgctgggcgggttccgagtccagggcaagtcagccgcgggcgctgtgaaactgctgcgggatgcattggctgtgcagaaagccggtgcttgtatggttcttattgaggctgtgccgcctgagattgcgggtattattacgcggcgactgagcgtgccgactattgggattgggtctgggaatgggtgttctggacaggtgcttgtgcaggttgatatgttagggaatttcccggaggggaggttcttgccgaagtttgttaagacgtatgcggatgtttggggggaggcgaggagggggattgaggcttatagggaggaggttaagaatagggcttttccttcggtggagtatacctatggtgtttctaaggaggtgttagaggagtttgagaaggctgttgatgaggttgcggagaatgaggagtaataaaccagcactcggtgtatttttgggtcttcagctgcttttcaaaacaatctgtacatgtgctgaagactttggactatagtcttggccttcaatatctgcccatcagaggtgatggcaatgtattgtttcaagtcggttttccgcatgctttaggaggcaaaagcaatggaagacaaaagtctccaagtatgaattaaaagcatagaacaattcaattcgtacagagcatatacagcccccataaacatcacccaatcaaatccacccgcagctttatccaagatcctagaagctgatactcttttcacctcaaaacacccccaacaccagcccacccaagaacaaacccgctaagcgcctcactcataacaccgccaccaaaccaaacatcccgccaagcgcccttgcggataatcttcctcggaccagccttgccagcaagctgcatgcgcacagccttgctcttctcattcatttcaataacaccctcgatctccccaggggtactaccggggaagaacgagccggcacctgcaccaccggagcggtgaatcagaaccgcatggaagagccctgataccaggatcgtgccgaggaagtaaaaggcgaatccgtagcctgattggagggctagaatcccggcggacaggccgaggaggaaggaggttaggctgtggagggaggaaaggacctatttcccgggttgttagttgggtgtaacatctaaaatggaggatacagatgcggtctgatattggtgtaggggatatgatatgcatgtggtgcgggataggggcggttgggtgggatgtgggatagtcatacgcggttgttgtgctggacggcctcaggtacgagaggggtgattagcagggagagttcctgctttgtgggtgccatttttggctggtttggtgtctttttattcgccgatttgttgtagttgatgtctggattgagaggttgagctatggctctcggtgttcgttgcgggtagtgatcacgtcttgagcgaaagtttgctgagcttgactaagatcacaggccttctgctctccaatagtgatgaaattgttgcaccgggaaatagacttgtgaaggggtggtcacagcagctctcggcttgaactgatggaggtcggaagtggcagtgagtttctagaagtgcacggaccacatggtctttttattcagatgcttcagacgagtacggagtacggagtatgtactaactacactacattcaacagcataactaattaagaaagtatttaacgtaaatcaaatcactcatgttcatatctactattaaccacccaatccaatgttcaataatgccgagcctttctcatgaatccgttcacatcacagcgtttgatacattccgaatccccatgtccttgattatgctgcaaacatagcagaaagaaaatgccagttccatgatgtcgctgacttaaattcaaatatcacattaaaccagattttcgaatttaccatcgacacgggcctccttgacctgctcaaagacctgatggaaaaacgttagtggctgatcagaatcaaataacaagcaacgcttacctttagcattttgttacgtgcacccaaagcattgacaccgcgatcttccagggccttatcatccaggtcgaccagttccgtccattgcaggtccttcaggttgtcggtatacttatgcagcctgagggaccgcagccagctggggatatccttcagaagagccgggtctgtggggtcctcaggcggctttgagctgcctcggcgaccccgcggagagcggcctcgtgtaacctccgagtggtctgacaggtagccttcactaccaagaccaaactgcccaatgttcagagagccgaggccattacccataagagggttgttgggatcataagcggccaaaaatccattgttctgcggtgacgtgaagcccatcggggtcaagccaccaccgtgcatagcaatgccgggcgatgttgggcgagaccgtctaccggccatggccgcctgttgttgggcctgcagggctgccagctgctgattgttgagaagctgaccggccatcaagtgctgtccacccaggcctgggctagccaagccctgggagagaatcgggtttccatgcgagttcttgccctggccatcattggagcgagcacggcggtacttgcgcgcgtcatccagagcaatgcggttgtttaccgtcgacaaagctgccagcttcattgccgtggcattagccaccatatctgcgtgggtgttggagttctggtgcgattgctgaccgaaagtcgcagtcatcggagtgttagtcattgacgcccagctgtggttgcccacattgtatggcgaaagcaaagggggctctatgtcgggggcgggaatattggcagtctgaggcagaggggagcgcatgcccgagggctggctgaactggcccataggctggtgtccggaggatgacttgggccgagcgatcggaggctgcgtgtctgaaacaccacgctgagcccacggagagccaggctgttgacccaggccgtcgggattgttgtcaggcgccgagatggtgggggccacgaaagaggcacgatcgaagactgcgctattgcggtttgatggaggtgcattgccagtttgctgggtaaattcggccttcttcttcgcaatggccgcagcagcatccgggaacatcgcattgatggtagaagggtcgaggacagagttgcgcttcgcgccaggggatggcgggggtcgtccgagggagttccgggaggtgtccatattaagcttcgacatagcgtcgctcagacgactagacatggcatctacacgacgaaaagtaggttagttacatctcaaaaggtagtgtgggcaatttgtcatacccttttcgccaaaattggcaggggagagcaggccggacatcgggtgaccctgagacatttgctgcaggacctgaatgaaaaaccggatctgcacctgggtggtctgctgcagcaaggcatatagggccgcagttctctcggcttcactcagaacacggaaccattgctcgatggcactgagttcatccttaaagtcctgatcaagcgtggcagctgccatttcttccaatgtagtttcgtactgatcaatgtccgcaagccattgttgagcggcacggtccaaagcatcttctgtcgcattctgaccttgggtttgttggttgaaaaagacctccgatgatggacggatgcttcgggcggacagcggcgaaggaaacccggacatgtctgccgacgcccgcagctggtgcgatccgaggtttcgcgacgaggatggaggacggagagttgaattcgatgcttcaggagtgctgttgcgattgccaatgatatgactggccatggtttagggcgacgtgttgagaggatgactagtaaatacagtgggggaaatgattactgcaaaacacctgcaggacctgctgagtttgcgtaacaaataaaatcaaaaaataaccttcaactaggatccaggctaagatcctaaggtatcagacgacgctgaaaagatctagatctctcgttaaagatgatggcacagaccagtccagtgggctgcacctcggaaattcgagatagaaaaaattaaggcctggaacgaaaggaaattgagacttgaagcaatagtgtgtcaaacacagtcaagccagtcccaaagaaagatgaaaaggaaagaaaaagggggaagagaagaggttaggtggagagagaggagaggagaggaagatgaggaaagttggggatgaagaagtttggtgaagaggcttttctgtttcaggccgcgaaatcacgggttcgccgaggagaacctcagggacaacattctttcttgacttctccatatctcatgattctgaatcttgagggacctctattttctactctttcctgggaattctgctcctcgtggtcaaatccgaatattttcttcagcctagtggagacgttactatgaatatctgccgagcccagacctgagattcagcgcgcaccaactatactgataatgagcttccttggtggtccacgtttctagtaattgtctcaaactatagccttatcggcagtggaaaacacttcctattgaactttcaatcgtcactggctatgagttcccagcattacccggacgggattcctctggatgaggagatgcacgaggggcagtcggagtatccagatatcgatgaaactgttcgctatccctggcaaaatgatcaatcttttaatgttggcgacatgcttgcctcggtgattgatcctcgtttgtttggggaccaaaatccacaaatccaacggcaaagcatcaatcaatatcctcaagatctcaatgaagaccaaggcgaagtcgaagaagagcaggaggttgatggactctacccggatgaatatgacagccaggggtatcccccagtatcatatcctcccgtgcctggcgagcaagccgtgtcggacgaggactttaccttatctggagacgaaagcgagaggtacgtaagttaagacaccatatctccggttttagttaacatgatactagtgattctgatgaagatgaaccagcagaggatgatgacgatgatcattcagccgccagcaggcgccgccgtcgtggcggggggcgcttttccgcgagatggggggcccgnnnnnnnnnnnnnnnnnnnnnnnnnnnnnnnnnnnnnnnnnnnnnnnnnnnnnnnnnnnnnnnnnnnnnnnnnnnnnnnnnnnnnnnnnnnnnnncccccgccagcgggcgccgccgtcgtggcggtggtcgcttttccggaagatggggcgctcgcggtggaaagggcatcaaaagaggaccacgcaaaccattggagcccagtccggaattcaagcatcttcattcgggggctacctctgccttcatcgatggagactacgaacgggccattgatctggtgatgcaagcaattcagattaatcctgaaatgtttgctgcccattctttgctctcggaaatcttcctcgcacaaggagagaatgataaagccctagcagctctattcaacggagctcatacgaggccgaaagatcccggtgtctgggtcaaagttgctcgactcatcttagatcgcgccggagagaatcggcagtccgcattgcatgatgtagcttattgctacagccgtatcctcgaagtcagcccctccaacaccaatattcggttccagagagcagcaatctatcgtgagctgggtcacaatggccgagccgcagcggagtatgagagattactcaaggactgcccacacagtgccagagcactgcgccatcttgcagagacgtacattgatctcaatgacgtacaaaaggcagtagattattatgcggacagcattgatcactacctatccatcgaccccgaagcctctgatttcacctggtcggatctcaatatctatgttgaactttttggctatctcaatcaacccgaagaaggactcaactctttgagaatacttgcacgttggcttctaagtcgcggagaagattcagtatgggacggccacgaggatgacgacagagaatgggacgctgatgattcgccacgacggatcaaaaccgatggttttctgcccgatcagtggcctcgagagtcatatgggcttggtcttccgctggagcttcggataaaaatgggtgtttttcgcctgaaattgggcgacaagtatcacaacgaggcattggtgagtttgatcccggatcacggtaatgactgaataaactaatacaatcagcatcactttgaatggcttaacccagaagacgactccgaaggtgcccgaattttcgactatggtgatcttttcagggaagtggcagatgctctaaagcaagccggtctcttcgaagaagccctccggtactatacgcccatccagcagaccgccgaacatgccgacattagcttctttatggccatggctgactgctgcatgcagttaggcaagatggaagatgctgaaagctgttatctactcgtcgctgaacacgatgccggtcatatggagtcgcgagtactactagcgaagctatatgagagcctcgggatgagcgaacaagctatgaaatatgttggcgaggcagtcttgatcggccggcaggaaaatcgtagccgcggaagaagaaaggacaccagacttgaacagcttgccatagaattcaagatggctgaatcagaacccctccggtcaattgcacccaaaccgacaaatacagcaccacttatgaatgcagctccttcggctcctggcaaaggacgggcgcaagctggcgaaggtactcggagtgatgatattcaattcttgtacgcgaagttgttagagttgaatccccaagtcaaagacggtgtccctctggccattgaagattggctggacattgctgatgctctattgcgagatttccggaacaatcgggcattctatccaatggatcgaagtattgctttcaggggatattcgactggtgtcaaatccaagaaccagaccaaaaatggcacaatgatggatgaaatgcagcaaatggcgggccgtcttcaagaaaccatgggtatgtcacccgggtccatcctccatccacaccatgctaatgttatatcaaggagatttctcggaggagcccttgcagggcgccattcccaccgactaccatggaataccatttgatgagtggcttgacatattcctgcagtacgctttactcgtagtagaacaaggcgaaccagaggaggcctatgagacccttgattctgcggcgattgcaagcatctggttgcactctaagccaaaatcccgattgatacatgtttgttggttcagtgagttcattcaattcactactgagtggttatccactaacacttttacagcatgcgctctccgcgcacgagatgaagagacactggctaatgaagcccgttggtttatcaaagaataccagtttgtcaccgatacttatcgactcttctctatgctgggccacctatgtggcgaccctcaccgatcccttttccattcctccggaaacatgaaatttatgcttcgtcaaatcaaggcaatagactttacgatgccacaagatacgcctcgacccattcggcattctgtctggaaagagcgcgccactctatccacacgggatgaagccggtgagcctatcgctgcgaaagagttagatattgctcttctggtactttatggccacatgctgtactctggaaacagtttctatcccgccctgaactattttttccgagcatatgccatagatgaccaaaacccggccgtcctcctctccatcgcactctcattcatccatcactctctcaaacgacagtccgagaatcgtcactaccttatcatgcaaggactgtcattcatgcatgaataccggctagttcggcagaagccgggaactcttctagctgaaaaacaagaaatggaattcaacttcgctcgtgtttggcactcgcttggtctggcccaccttgctgtcgaagggtacgaccgggtgttaaagctcggcgagcagattcagaaacaggctaagcaagagtctcttcaagaagtgacacctgcaatggatggtggtgatgtggtgatgggtgatgatggccaacaccaaaagacttcatcgcctactggtcagcctttcgttgaggatttctcccgcgaggccgcttatgcgctgcagtgtattcatgttctcagcggcaatgcacagacggcaaaggccgttacagaaaaatggcttgtcatttgatataagttcgtgtctgctttccagactgtctattacttgtaatgtatttatatgagttaaagcctcaaaatcaacactactgagttaattcataagccattatattcaaccagccttcacatgaatgtgatatcaagataggggatataaacccaggacctgtgaatgtcgttttaatatacggagttactgcatgtacttctgtagatagaaattttgacgttgggttgtatcacacccaagatgggagtatttctttctcttgatgtcattacttcaagaccttgaccaacatatcctaaagagaatgagctcactgctgcatacctctcctttattacataacgggatttcgctgcagagattatggggttgcatttgcctccttatctttcaacccccaaggttatattacatattgttctcgcttggctgggcgaaagggaggggactctggttttgagaggagtcagttcggcatcatttcagtcagtggaaacattgaacggggggaacaaagaagttgagcggctgtgaactaaccctagttgacaagaatgtggggagtgcggaaatgcaagcggaaatgcaattgcaattaaaatgcttgctaatcaacatctcatatacgccttaccattgtggcttattactagctcacaaatgactttgcaggccgaagtcataattctttcgagtcggttcggccctacctcgcataaattcaccttaaacctaatgctcgtgtctttcggcctcgttgatgtcatcgagtcattgatatagagaagataatacggccacataagattctaaaccctagagaatgactgcggatagcacccaaagggtcggaaaccattccagctctcaaattgaaggttctgcagaactattgccgatcacatcggcgcaatccaattcccccgcagcccaggagtttgatgaagacgaaaaagaccatgatgtcaatgtccaaagcacgacagaagagtcaatagggaagcgcaagtattggagacgttttatcgatgctgtttcatggacaccgccgcgatgtcgatggaatacagagaatccgatcaaattcggcttgcctttgaatatcctgttcgcattctcggcaactttcacggtatagcactgagagattgcaatatatggcatagcaattgctaatatggccatgcaggtcgccaatctatactattcacatcccattctggatattcttgctcaattcttcgatgtctcgcatgagcgagcctcgctgatcccgacctgcagccaagctggatatgcgacaggattaattcttctttgtcctcttggtgacttagttcggaggaggcacttcgtattgctcctgacgcttgttactgcggcattgtgggttggtgtctgtatcaccaagtcattcgaggtattccttgtgctgagttatctatcttcggtcacaactgttactccagtaagtggttacaagcaagcatatccgaggctctggcctaaacaaaaaaattaatcatcaatgcagcaagtcatgctccctctcgtcggagatctggtccccccagctcgtcgcgcaacagccctatcaatcgtgtcttcgggactcgtcctgggccttctctttgcccgcctgctctccggtatagtcgcagaatactcgtactggcgaaatatctattggctatcactaggcctccaattcctcattttcgcccttctgtggctgttcatgccggactatccatcaacaaacaccaatatttcctacttcaagatcctatattccatcatcggatactactggaaatccccagtgcttgttcaggcaactctcatgggatttttcctctcggccacattcaccagtttctggacaacactcaccttcctcctatccggcgatccctacaactacccaaccctgacaatcggactattctctctagcaggtcttacacctatgttcctaggcccactcttctcacgctacatgatcgacaaattcgtgccgcagttctccatcctcgtcagtttcagcatcctgatcaccggcgtcagcgtcgggacctatacaggcacatatactgtcgcgggcccaatcatccaggctgcgctgcaggattttggtctacagatgacgcaagttgccaaccgtgttgcgatctacagtgttgcgcccaaggcgcggaatcggatcaatacgggatacatgattggcgtgttctgtggtcagcttatgggtacctctgttgggaatcgtctctacagtcaaggagggtggattctgtcgggaagtgtcaatatggcatttattggggtggcgctgactatttgtcttcttcgtggtccggctgagaagggatgggttgggtggcatggtggcattcgcatccgacgaatagagtgaatcagagtgatgttctgccgtgcttgggcttttgtgttcttctacagaaatatagttcctgctaatatgctttacgctagactacatgtgcgtagaaccttcaaaagtatcagacctcttctatttatttgagatttaatgatcaccagtgcatttaacagcaagcttataaagaaaacccacggtagacatatagtatacgccaaactgctgccagcctgctgccagcctgctgaacttcgaaaggaatttgagtacttatctatttttagttatgtacgatgacgtgaatcagtccaatttgtgcagattaattcaacgacgtcacttgaaaaagaatggctactacggagtactccgtagttgattcaagcttgagatccactttgacactcactctcaagattgtagtaagtaaaaaagaagcaaaggtacggaaagaccgattttgtaaaaatgatagaaaaataaaaataaatgcatcaggagggaatcgaacccccctcgccagtttacttgataaggagatttcctaatctggaagactagcatcataaccactagaccactgatgcaatggatatgtttaaacgtcaaccagtatggttcatcaagtagagttacatatatattggtctccgcactccagcatcatacatgtctgtgaaacactgtctgtccagacatataatcccggcgacgctccactaggagataagggattgggcaatgtcgaattcaataatagatactaagactgtgatggctacacattccatacaacatggttacagtctgcgggctccggcggccgatcaccttagaggagataagtggcttcaaattggcaaaaaaggagaatcatctccctaagtcaatcaatgatattttcaagttgatagagcagatgctagtgagaatgttggtctttgtcttgctgttgagtctaagcctacatccagctagtcgccagggcaaattgaatgatttgtgtagtaaattgtcctgtcgggctgtatgattgaggtaaatattggtgactgattactcagggcactttctacgattgatggttggcacatctgttgaatatcaatatcttattttctagcgctgtgatattatctgcactgccagttgagacatctgttgttctgcccttatatctagatatagttaatttgctggtaatcacgtagcagccatatttcacagggatatacgatttgttagagcctccccttggctattggtcctgggattgatttttacacctgtgatgaagaggacagcgttatatatctttttttttttttggaaagaggtccactgattgagtaaaccacctttataatcaacagccgatcctaaattgagtgtggcgagataaaacaggtatgcaaatgcaacgatgtcaaggaaaagaatgaatgagcgggagtagtggcatactccctgcaagttatctgagctacttctctacagccttgtcatggattatcccaagcgacagcctctaggtgggaagcctgtatggcttgcaaatccaacgctcaatatctcacttaagaattgaggtgttctttttctctctcttttgagtgaggacctggtagctaagcagatactcttggccagccttattcggatagtcataagctgtctgttgcaaataggacgatctagacaactcagagcccgaccagtccgagatgagggtgtaggcaatcaggattggctttgtcaggaaacgcacaaatagctggtcttaccagaacctgcgtaatcatttccatagatttcaatataattgtacacatgttcgtagtaaagagaacaaagttgaatagttggcagtcaaacttaaacttaaatctatgggtatcagcgtctacaccgtagatgaaacggctatgctaggggcattcgaaggaaacgcagatatattgtcaacgccatatttgtcgaccaggccgcgtttggaactcgcagcacgaacggcaagcaagtcgcaggctgctggtgttagaggtgttggtcgctcatggtgcttaaagtacaaatcctagactatgggtagccaaattgtgtccaaagtcaatgatcaaaggatgaagatagaaattttgcattgtaataaaaaattggagagcggggggggggggggggccaccccaaaaggaaannnnnnnnnnnnnnnnnnnnnnnnnnnnnnnnnnnnnnnnnnnnnnnnnnnnnnnnnnnnnnnnnnnnnnnnnnnnnnnnnnnnnnnnnnnnnnnnnnnnnnnnnnnnnnnnnnnnnnnnnnnnnnnnnnnnnnnnggaggcgggggggggggggaggaccaccaccaagtgtaattagagaaacactttcttgcaaaccttgccctgcgaaggttccgtctcttcatcgtttccaatctcggtaatttctacttccttatatcagtgtctaatgtcagtgtcacccaatgagttaaggggcagtggcttgaagggacattacagtaatcagggagccatatctaacgcctttcatcaaagcccaatcccaatgtcgattagcgctagtaacccattttggctgtcatgatgcgctttggtcttcgaaactacagaagcactactaatgtaggtcattcttattcctactcgaattactcggttcttggcttgtcccaccactgccgcccaaagcgccagttggggctcggtacggatgccatttgggggcactgccagcaaaggcacgtttctagaaggagcatagcgctcagggtcgcatgcacccatctgatgcctgaatccctcgatctcaagtacccctcgggagctacctcacttttatactcccccgctcggccaagccgaatttcagcaaatggtagtctccgctttatcaatatttggcaggtgtccttgaggcactttgattagaatatatctcccccaactttagtattacacttgaagctgtctatgtacacaacatagccccgtttgataagaaaaagaaagaaaaacaaagcacatgatcaagcgcagcagaggcaaaactatatacgaggccaaaaacgatcagatgcatatcaataagacataagacaccttgctatgccgatgaaggggggtaagcgggaaacaaaaaagtaaacacacaatccaagggcaacgggtgtattatccgaaagtgcccaccaataccgtcaaaagccgcctgtcattactggatgttggatatccaaagtagcgggaagtagtattatgacgaaagatagggctgcaggtgccccgaagcagaaataacctagtttgagccataaactttgatagagccgctcgggccgcctgtctttttctctcagatgaccacggcatcctcgtcccgatagtagtctggatcgtcaaagaaaactgcagactggcgtcgtagttcctcgatcacgcttccccgccgggaactgggggtatgaggacgtgatgagccggttgattgagacatgctatctgacaagtcaccaaaacgcgactcgttcttgtagctagatccatcgcgctcggggagattttcatctaaacgctccaccatagagtctgcatgttcattttcccgattgcggattcgacgggacaggatcggggagagcgcacgtccacccgttctagattcttggagtcctttcatgatcgcattctcgaccttgagccggttttggataaattggattttggagaaagtactctgctggccgacatgtatcatgcgggcgagcctttcaggagtgggatcggaaagaatgtggatgaaatcggaggggatcgtttttggccagatagttacagtgccactgaacttttgcaaccagatctcgctccaatcctggcccaaaggtcgtgggaggagctctaaatgccgaagaactcgaagccatttgttgaggtctaatttgatgtactgctcgattgcggtgccgaggaagcccccgcgccagccacggcccctgcggtgtgtgactggtcgccctactgtccctctagaactaaagaagaagaggttgatgtggggattgacctagggtagtgttagtggcaaaggttaaaacgtaggaaaggaatctcacctgggatacaatcgtaaagttgacgttgaaatgcaggttcaacgctttgataggtatatcagtccgtaggctaccatccttccatttgtgaccaaacgaataaggcgcgagagtgccatcacgctttttagtcattaatacaacagggtttaaaattcccggaacagccgccgaagcaagcacggcactccatatgacacagtcggggcatgtcagataattggctaggatagtcggtgagtgaggatctgagggcacgcaggtgacattcaaaatacgcccggtccgctcgtaagcttcacgaaaggtcgttgaacccctgcagaaccaggcgcattgtcgagcccagtccatagtatcgaaccgagcaccagttcgccaccagcgacggatccaagttgccagtccttcatggcatgcgcgaatccgatgtgctaaagctggaacaagcagctgctttagctcatcatctgtccgagttgcgactagtcccgccacaagtgctccgcctgatgtgccagttatgatttctgggaggacatcattatccagcagcgctcttaccaccccgaagtggtagtaagcgaatgtagcaccacccgaaagacaaagagcggtgcgtccaaagtttgtatcgaggtgtttgaaaagctcatacttggcatccttgtcaatctgtttgttgtccaaaatgatctgtatgcatgcgtgcacctcgtcgatgtattcctgaaccagctcctttgttcccgagtatgtctcgctatatattcgaggattttccacaccggaaaagttgttcttgacgcaagcctctaaaagtgcttgaagatcttcaatagcaggtacctcgctagagccgacccgaccattctccatttcccattccaccttcttcctcagctgcttcagctgcgataccaccttgttgacagtgagatggtcgtaataagcgtattcgtctgtctttttccacttttcggttccgagatggacgtccaatgcttgagccgctttcagccagtccggatagtttttctgtgcagatagttcctgacgcagcctttgccttttcccccgccatgtcacccactgttcatacaatactatgtagacacgcaccagagcatagccaaagctcagtactatgagccacgcgaatacaatgaacaggaagggccatttcaaaacagaatatagcacgccttccctcgtttcatccttgcttcgctttggtgttttgcggcggccacgattcttgcggactcgttgattgattgggcgccagtcgttgatggctgtcaatggggaggcttctggggcattcagcgccttctcgaatcggtcgagttcatctggctgaatgaagtcgcggtcgtagtcagggagacaggccggatcgtaagggtcgtacacagcaggtttcttcttagtggtcatgttcaacacattctgaatacaccaacgaagattttgagggttacaaaggtacctggaaagctggggaagctacgttgtacgatcatgacgttggcgtcacgtgtagtttacctccacattgcggctagtgtgtttccggaaatagctagtctggttttctatttgctgagtcatccggatcctgccccgccagataagaaagaaaaaacacaactacaagaaccatccggtagctaaagagcaattgcttcgaattcagaagtctgttgctcttgcagaaatgagggaattatgtagatccactagaagcaatctcttcaatattaactttgtcacagtcacgcaatttacaacctcgctcgacattctttgtatcgagagtgaattaactttgagaaactatggcaggcatcatcccaccttgacatgctgcggcatttcaggacgacaatgccgccgcccgtgcgatgtcattgaaaaaaattgtcggaatgtacccctccatgtacctcaccagcaagaaatcgacatccctccatgcgatctcttattcaatggtccaatgcgcaattagcggggtcgtcgtgctcgcctcccgagaccaaatgcgagatttcttttgttcccactcaaaggattatactacagctcaccgctacatggtgggcggcgcgaatatctagaattatattgccggcccgtgattggtaggcgtctcggaagagtttgtttgtcgcagccgaattggaggtctaggaaagcatcatgggctatcagcgggggtgaacattactgtagccatatgcataaagtactaggaagtgctttgtgctcgcggtatcggacatcaggtaccgagtagtagatcggaatgttagccacctttttatattatacagggaagcgtcatttcggtcacctgatgtaaaaatgaccccttatatatcgaggatgttttgcagcaactaaatatccttagcgtcgtcataggctgcagctgtccataattagattcgtttaggggcggttattccggacaattttccctcttggccatgttcgtcttccatgctgatcacaacctgctaaattcgtgaatgcaaatggtaaaatgcaatatgttgcgagtcatgggtacttattgctactttgcgattctacaccgtacactcgcttatactagcgagttctaagcatcatttttgatgtgtagccttcggcttgtcttgtaatgatacacaacgggaagaatatttattgtcccgtgttgcgcggtaaccgctcagtttattgtgttgctttaaccttttgtggtatccctgaacgtgccgggcgcgccgagttggagtgcggactcatgtcagggttaccctgttctcttgagagccttggcattttttggtatcttcaatctaaactcgaacccatcattccccatttggccctatgcagatcatggatcttccctcgcgaagtgttgtggcgttgtaggagccggtgagaaagcttttccccgcttacaaatttaaccccagtaactcctttccgaaaatgagcggcaaccgcagaagagaccaagctcagtgagccacattcgggtcttggcaagggaatgatgcgtatgccaatgacccgagccgtgtcaagccaatgaacagcatatcgcactgcacacttggcggggatcgtccaagggtggggaaaactgtccctcggatctccgaggccgggcaacgcccgaaatactcgaggccaacttacagtaggtagcgtttgttgttatgatgatgatgtctacggtacggagtcaacatactgaatatatacatacaatattgggtacacacagaggggcaatgtagatcgatccgacgtcatgtgccccctcttggttatgtaaaaggtatcagttcaatgtgttcaaacgtttatggggtttgaaaagactagcgtcttattttgtttcaagacatacttctggaaataacagggggttgtccatattatgccgcacatacaaagtacatatgcgcttcatagcacacacttcgataatggcagggatgctgtagactcctcgcatgaaaagtgcagtgtcgtatgcagcaaggctgggatctgaagttgaaccgagcgtttgcggcgcatttacataaatgccctggaatgttaagttaactagctctgaatattttgatctaactacaattataccccgcgctctaggatctgtcgcagggattaaaaaataaaatcagccatggcaattactgtgtccaaagtctttgaagacgcattttgttcttgatgctcaaatatgaaacattagcaatataaactgatgtcaaccacaactattctaggggtcaacggtcaacacccccctcatagagataaaatacatagagagatgaaggggtaacatcgaaccgtgggttgacgcccttatccgttttctatagaagcggtgtggctgatatcgggacggagtcgagtcaaaccatgggtcagatgaaaccatatctacatctcggtaacactaatgactcgtacggtatatgttgcagttgatgtcatctggagtatatatttaaagtaaaccaagccattttatatttccgattcccagcgtctccactcatcgagaggaatgtcagatgtcagtgcgagctgacggactcggacgatcgcagatagcgtaattgcgaattctagggttgaatgtcgctgattcgtcctttgacgggaaaatcaccaaggtatagcaccaaccaggtcctctgttgatgctcattctcgccgcattcactaaatggctacatccactatttcccctttaaggagaaaaggcatcctgcgagcatgcagttatcctcccatgcatgtgcgcccccgccaatcgtgtgcctcgtgcgatcatttgcttccttctcaaccctgattcgatcgcatgcacccccttcagcacctacaggtgaccaactacatattcggtaagggcacagcctatgagtcgtcctctcgtactctcgtactctcggggtttgcgctgaagagtcagaatggcccaaaaaaatagatgatactccatatggagtagatgagccggtaaaaaaaagtagaaaagcgggccaacagaagcacagggcaactaggccagttctcggcattcccacccggtctgcatcgtggactcaggttgcctgcgtgtggctgcgtcggagattgatcaacacgccgccaccgagatgggactcatgacaactttcaacagttcctaggaggggtgggtttcaactgcatgaatgggaagacgttaaatttttttttacgtcgatcaaagagaggcccctctgtgctccgtacaggacccaccgatagcatatggtctgagtttccttgctccacgatcggctcataatgtactccgtagactcaatcatgtaagaggaatcgaaccatcacggactaatatttgctcactattgagaaaaaaatttcggctgctgcttatagggtaatatgggggcttaacagggtaatcgttgactccaatcgtttcgatagacgcgggagagaagtcggcgaactaaattcctaggcgcagtccccataggcttgccacttcccacccgggtatagtagctgcattagtggcagagacttattcatattagtgatggttatacggtattattagactaagtacggagtatggaccactccgtagtctgtgtcttatagattacttggataggtcaaatttgggggaagaggacacatgtagggaagacgaggcagaatcggacaattgcattcataaaagcataagataataaaagatccaaagtagaaaccgaaatctctcggaagtatatcagacgactatcaggagaatatgctctcagctgataaaagaaagtggaaatcaatgtttccaaggttgtaaacgtgtattacgggcgtatatgcttgtgtattgtgttatcaggataaggcgtattattttagctaaataattggttaccccgtgccaccaccttttccctcttcaccttttgtcattcctctccaatctctatctcacttttcgaggtctcagagaggagatcgagtcgttctttgacactccatattcatttctcccaggtatcattcctcctccctcacctgcctcccggcgtccccgaaatccccaatgagactggtcaatctcagcacaccgttgctaaccttcgcattcagagcctcgattgctcgctttttttttgggtctcacttgggtcgcacaagcaagatgtcgactacatctagcaacctttgttgagccatctatcttcagagttctcccggtccatcaccataccccccgcccccgttgacgccatggagaaaatcaacaccggggatggacaacttttcatcaaggtttgtgttcctatgcagctgtcgcctgatcattgcgatgaccagagatcgtctgagtgcttggtccgatagacagctgacgcgcatggttgctatagaatgtcgctagctacgttcgcacacacgagaaggccctcgccaatgcactacagctccgtcgccagcccacaaaaaatgtcattccccaatcgcccagtgtacctttgacccctggtagctctttcgcctcgacttcgtcaacactggctgcggccttttcatccgcagcattgaaattcatgtcgcagaacgccaaaaccgccaaactcacattgactccccaccaccttttctaccttctctcccgttttgaagaattgaccattgccgttggtcctatgaacatcaggctggaaaacattcacaccggggtttcgcaatcctatgtttcattcctgaacaagccccaacagtctcggggcgatcgggcctccatccattcggtgtccagtgtccgcagtgtgatgtctggtatgacggacctgtggtcatctttccgcatcggatccaaggataccccgacgaagtcggacagggccaaggccgctttggaaatggacttgaagtatttatactctgcctttaccaagatcccgtgtcttcgtcttgcccctgaccaccgtgctcctcttatctctggatatgaagaatttccttttgatacggctgtgccgctgcattccttcaagaatttgagcgctttagagattattgatttagactaccgttctttctatggctgggacagattgtctgagcaactacgcactttgactatcaagagaggtcacctggatgatccggctgatcttttaacgagaattgtgttggacgacattgacaaacgccgccgtcggtctgctaagtcccaacagtcgccttcactaggatgggccagttccagcagtcagccgtttcacactcccgaccaggccaattccatgtcagcccctggatctcctatcgcggacacagcattcggaactagcactagtcccagatctgccccgatgctcagagctggctcggaaggcaccaaaattcgccccagggccgggagcgtctctccaactcggcctacgacaaagcacagccaccgtcgaggccagtctcggcaaattcgccgcacgggctctgcaagctctgaatcaagcgagacctctaacagccatcgaaatggaagctctacaaaccttctcacagacatcctcccgccttcaaaatggcgattcctacgacacctgggccttccggaaaattccctgacatccgtgtctgctgccagtcttgcccctgtagccaacagtctcaattcgcttgatctgtcctccaacctcttggcggagattcccgacggtgtggcatcgctggtggcgttgagagccctcaacttgtcgcattgcatgatcgagtctcttcactcactcacccgaaatcctcttcccgccatcaccgttctcaccctccgcggaaatcgccttcgttcgctcgcaggcattgagaggttgctttctttggaaagattagatctccgcgacaataacctcacggacccgactgaaattgcacgactaaccagtcttcctgaaatacgcgagatctgggtatctggcaatccgtttgtcaagactcactccggatatcgagttgtgatcatgaacctcttccgccgcacgcctggttattccgaggacatcataattgacggtagaggtccgggatacaccgagaggaagcaactggtggagcgagttgcagagcctcaagctgcaccgattgtacgctccagcccggcggatgaatcaacggtcgtacagaagtctactatctcgaaagtgccccacgatcttgcaatctttaagccccaagaagacgagcgagatttgcacattaatggcacacagctgaaggaaagtgacgggggaaccaaccgtcgcaagaagctccagcgacgtaggatagtcgatatctcaacagacaacccgtttaccaccgatggtctgggcaattccggaagcctggctctcccggctcttccggttcagcaaattcaaccgccagttgaccgtccgaccgttgtccctgttgatcagtcatggaggctggacagcgctacgcaatccgggtcatcaagcatccgaagccccggaaagcccatgcattcgccgagtcctcctcttctacaggctttgcagggtaaggacaggacaatggatgaagagttttgccgtcagcagctggaagttctacgtcaggatgtgggccataaatggttaactgttcttggcgagaatgactgggataattcccgtaaggacttcgctcacagctctggggcgggcctggaccattcccctcacatttccccaccttcactcacccgctcgaatacccaagggatattgagcggaaatgcgcttagcggataagatacgctttttttttacagtcctcttttgccgggactccgtttgcctctcacgtttccgtttcatgacccccggagtctcttcgtcgtgggtgcgacgtttacctgcttcagcaggtttttttcatctcttttcctcttatttacgaggacacaacttccctcgtacggtcccccgggactcatttgaacaacatattttcagcatcagcagctgatcattctatgcattgttttcggcgttggacgacttatgagacatggtgggttggatgtatgaactatttacggccgtctttgctttccttttcactgtttcatgtctctattcccttttcccaaaacgcatcctgcgatggcccttgtttttgggggtcatctcgatccacggaaggcacagtgaaagacatctttttttcgattctagcgttgtactgtatgattctgaatttcgggcatgttggcgttggaaggatctttgacttgtattcccctcttgttacttcttggtttttcccttgttttcaattccttctgtgtgaagctgcatgacttctggagtagcattgtatgagactagagcttggagctcagagctcacagctcatttgagaaaaaaacgccaattattttggaggtctacttttctactaagcatgtagatatccattctatagagtagaggatccaatcgacacacaaaaggcattagctctcagtctagatgcgctatccaaactatataattggactattttagttagatcagcctattatttcgtgcttagaccccgtttggcgtcgagggcgttatgagtcgagacctagaatccaccctccccctctatgcaaattttttgcatcgtcaaagcgcttcttgtaacacggaaaagatataatagaattaatagaataatcgaatggtcggatgaaagtagaagggggggggagttcctttataagcgctctatatataacaatatcacccccctctctctccccttgaagatcaaacacgcgcaaacacaaaataggaacttcccgctttcttcgtagaaaagattctcttctcttcaacattcaacctcatctcgatcacgttcacgttcacgttcacgttgctttgaaagagtcaaactggtctgactattatacacccgagaaaattttctcccttgattgaaatttgccttccctcggaaccccatactcatctcggttcatctcgatccatctcgactcatccaccctccgacttctttcatcccaagtcaaatcgataagagctcagtgctctttcgctcagcctcgtttatcttgtgaggcgtctaggagctcattctcttctccctctattgtgcgcgtacacaacaactcggataggcaccaccgtccacacccgtctggcatctccgccagaactggttttttttcttctttttgccgtggccgttggggcccttctctagatctgtttggtcttgcaatcttctgtttggtaggcatctattccatttccctccgctgctgcttctcccaacacctccgaccgccaaagggggagaaaatccagcgaaaattttcgagcgcgctcgtcaatttcgcttcaccttgggacttggaatacagactagacttcatctcaatctgcgacgctttattaacttgtttttccaatagtaacaggacatagccgccgcgtcatcaaatctctgttattctcacccgatcgctccggaagtctctcttccaccattcgcttctctttttcttccacccattttttcttctttctttcgtgttttcgttagacattattcaccatggccgatcaggaagtggatctggactcgattatcgaccggctcctggaggtgaggggtagccgccctggaaagcaggttcagctgctcgagtcagagatccgtttcctctgcaccaaagctcgcgagatcttcatctcccagcctattcttctcgaactagaagcgcccatcaaggtaagctgtctttttgtgtccgaatcgttcctcggaatcagcctccgtctaacatgcgtgtctcgctagatttgcggtgatatccacggccaatactatgacctactgcgtctcttcgaatacggtggtttccctccggaggctaattacctcttcctcggcgactacgtcgaccgtggcaagcagtccctcgagaccatctgcctccttcttgcatacaagattaagtaccccgagaacttcttcattttgcgtggaaaccacgagtgtgcctcgatcaaccgtatctacggtttctacgatgagtgcaagcgccgatacaacatcaagctctggaagactttcaccgactgcttcaactgcctccccattgccgccatcattgacgagaagatctttaccatgcacggtggtttgagtcccgacctcaactcgatggagcaaattcgccgtgtcatgcgccccacggatgtaagtttctcccctcccctctggtgtaggtggttctattggcagcgaaaataaaagtggcagtgtggcgctgggttcgtttggctgaagcccaacatcgctgactgaaatagattcccgactgcggtctcctgtgcgatctcctgtggtccgaccccgataaggatatcaccggctggagcgaaaacgaccgaggtgtctcattcacattcggccccgatgtcgtctcgcgcttccttcaaaaacacgatatggatctgatctgccgtgcacaccaagttgttgaggatgggtacgaattcttctccaagcgccagctggttacactattcagcgcgcccaactactgtggtgaattcgataatgccggtgcaatgatgagcgtggatgagagtctgctctgctctttccaggtgagttattcaatttttatccccgagattgtttctaattagttcctaacctgctctttttttccttccgatagattctgaaaccagccgagaaaaagcaaaagtacgtttacggtggcatgagcgccggcggtcccgtcactcctccgcgaaagcaaaagaagaaataaaagaatcaatacgagcttccccatctgcagcaggttcgggcggagataagcctttcacaaatctctttaacagcgccctcatgacatcctccctacaccccccgcgagtcccacccccggatccacgaaaacgatgaacgaccgaggaaaccctcatccgcacccagggcagcccgatattcctcttcaactcccgcaacgataatatcagtcacattctcaaccctccagaccccccgggctctctctctcccagtgcgacatgcgataaaaacacaacagtcaccccatcatttcctggcccgtgcgaccctctgtacttccggagcggagttcaaatgcttatttcttcgttgtttctcgacttctctgtctctgtttctaaccatctggactggaatgtttttcctttcggcatcctgggaatggggaagggaaactggttatcttttctcttttctttctctttttcttactttttattgtcctgttccttgaccgcatgtgttgttgttttcttatcgaatcctattcgtctttcgacccgtcttctagtccgacacgtacgaggcgctagtagtacctttctctgctgatgcatcgtataccggatttggaatgggtgtctgttactagcggtgttttgtgaatctagctcgaccttagaatagtttcttcggagatctagattgtatgttatacgggctgcaacgattacaattgaggttattaggctatgatatctatcattttcggatagttaaatctgtcctggcattgatactctaactaatacattcatactccaatcaaggaattggaatatgtaaatacttcgtacatgtagtatgtgaccatacatacctgaagtattctatgtagagagctagcaatagcaataatagcaatcaatatcactatcactatcagtatcaggattcagtgcacactcctatgtttgtaccaagaaagaagaactaaattcaagtctttagactatagtaactaggaaaaaccagctagctagctcgagcaaaagcggagaacaaaaggagcaagaattgaacaaacgtgacaagatcaggtacagcgtagtcgagtgacacattcaagacgtacaagtacgtccggggtaaaacgttggattgggtttgtgggaggggggtgggtagcatagctagatatgggatgttcgggtgtagaggaatgtcggaagaagccaaagccatttctttcacttggacacttggccgagtggaatgatatggatttgaggttgacagattgaggaaggtgatcagttgtcaggagaacagggaggaactctgtttaaacgtattgggacaaccatctgattccctcgccgtatcctgtcggggaaaagataaaggttagttatgattgtttcaatgtctgcttagccagcacggctccagttttcactgttgggactggacgaaactcaccctgtcgcataacaacactgcacatgaacacctcgatagggcggataccctcgagagggaccttgcccttaccagtggtctggtagagaccgagctggtggcgcagctcatcctcgctgacagcatcggggtgatcgatcttgtttccaagaacgaggaagggaaccttggagagctcctccatggcgagaagagcgtcgagctcagccttggattcggggaagcgctcgtaatccttggcgtcaaccaggaagacgattccgctcacttcggggaagtagtccttccagagacggcgagctgaggggaaaggtaggtccgttagttatgttcagtcccatgattcattgtggggggtttcgtgttgcttagcagtatgcttgcgcaacatcagaattccccatcaagagcattactcaccctgctggtgaccaccgagatcgaaagtcgtgaagcggttgttaccgatagccaactcctctgaggttgggtgtgcggtaggttgcaggacggcgacacggtcgttctgttgaatgtcctgtcagcaaacgagccccacacaacgtccagttcttatatcatctctcccgtgctatatccaagctccctgatctgtacagaaatccagcgccaccagactcgggacctgtagccagcggaattgaacaccaaaggactagatcttctcttcccaaactcaacaccaacgctcaactcaccttcaacatgtgcagcagcgtcgtttttccggcattatccagaccgaggaacagaagcttggcgtgcttattgaggagacccagcgaggccaagatatcgtaaactataggggaaagaagcgaaatcagcaaattgcaccttgcacctaaagacgcacgcctcgatcacaagcagccggtaccgcggcacagccgtcgcatgactcgacatcagagttggaatgaagacatgcttagctccagtgcagctgcactgtccggggaggtatctcgttcactcttcccctgtgttcgagatcggccccggacgtcggtgactgcaggtgatcgggagtggtatcgggagggtacttacaccagttaacgatccacatggtgaagggccggagtcagaaattattgggaaagagggtgacgagcggggatcacagattaagatcagtaacaagctgattggggggatgtggatggacggggtggaagagatagaagcaaagaagacaggtttgatgttgttttcggggattggattggtgccttaggcaggaagacggaatcctcgcgcggcggtgacagcgataggctacgacttcagggattcgggctgatttgggtatatacggatgggtttgtaaattctctgtgatttgtttggggatattgatcataattgcgtacttctctctgaaccttcgccgtggcgaagacccgccactactcgatcttgttggtagtattactgttatcatccaccttaggagagaagaaggttcatctaaaatatatttcatattcactcccatcaaactgatggatctctttattcacaatgcagaaaagccagataggggtatatgcaccgcagccatgcaagacaacaaaggaagcgacctccagcaagtcccaaggaacgcagtaagggagaagagggaaaagaatatagatagacttccgacagaaaatgtaaagaaagaaccacctccgtgtaggaattattgaagagaagggggaaaggggtaagggtaaagaagccattcatgtggataacacgaagtcggcgaatatgtgtaagaaagcgaaaggcacggatcgctaaccgagcaggataacacaaaaaagaccctcgaaaccagaaggtcccgaaaaagtaggtatgtacaggtcaaaaaaaaaaaaaaaaaacggaggtgtgaaacttttcatacaagttctatgggtagggacacctaaacggataggacgagctgggcgtcttgagcgacgccgtaagctctgcacctctcagcaacttcgaggccaagctccttcatccgttcggctccatggcctggaataggccgtttgcccatctgctctttggcagctttgcggcagtgttgacgccagaacttttctttgcgtttctggcgcttcttctcgagcccttcgacaatgtcgattgggccacgagtgtgtagctcacgggtacgtgagtgttcatgctctggggactcagagaatggtggaataccttgccatcggtgatctttgtctagaccggcgaagaaagggttggggacacggggaagtgacttggtacggacgagaggccggcgctggaccaggtggctgatgttgacacctccggcagactcaacgatgggcatatcctcggtgagttcccatgtagctggggtgggcgacttcgctctcataggtggggccggggacttgagacgcttcggagagatgcggccagcgcgagggggtggcggggacatcagacgtctgggagagcggaggggtgattgcttgcgggcctcgccctctggccgtcctcgggtaatttcctcgcggtctcctttggaggataagctggagagctcttcctcgggttcgaggtcttcattgtcttccggatcgcttgtggggaagctggggtcgatatcctgcgggatgataatttgtttgagacggcgccgttcttcgaggcaagatttgtaggcaagttcgaggggacgatcctcatcgagagttccacagacaaagtcggtactatcaggaaggttcggggtcctcggacgaatcctaatgttcttggagcccttcgaagtgcgacggccaccgatcctttgtacaggggctggaagccagttcaagtgatcgtccgtcatggagtcgaaagatgtgttggaggcccggcgttccatggttgagggacgagcatcgatgggtgaactggttggttttgggacacggtgtgatgatccccaaaactcgatatccgagccatcatcgtcgctctcgtccgactccgcgaagccagcctcgttgtccgattcattgccgtcgtctgaagagaagtcgtgcacagtctcgtcgtcgtccggaaggtcttccatatcctcttcttcatccaaagcctcttcttccgcctgttcgccgagccgtcggatggccatttctttcttcatgcagtcgtccaaagtgatcttttgtgtatagtcggcctccctgttcacccattcatcatcttcctccgtagagctagcaaactcgtggaaccgggtggcttcggattcctcgaacttgcccagtccactggtggggatacccttgcgctctgtagacgcagagacagcctccttagaaagctctttgggggtttcttttaatttgggagaggctctgcgagcaagaggtgcaggggaaccgcggtatcgcggccggagggagggcttgcgcgccggggatcgctctctctgggaaacagtctcccgtccagggcacgcgaaagtaagtgtagttctgcgcttgaggacttgaatcgagacgtcttccgtgggaagctcgttcggtgcttgggctttgggtgggagttcttgtgacccagagggtgagacgggagatcccagctcattcttctcatcagtcttacgaccacaagcgaagctaatgcatcgtttgcggccaaggttggcctcgacggaagtttcactggcatcaacgacgttcactttgggagtcaaattcttctttccaatcaaagcagcatttttcatcatctgtggtaaaggtgggctgggagtgttagagaaagatggactcgtgaggtcgccgtcgctggtcaactcggctgttgagacgccactgaggttgctgtgataggatcggtacatgtaggagtcgtagtgggaggtgcgaggatcggttggggacatctccgggctgctcttcaatgcgcgcgtgagcagtgattctttgcggttcgttggccgagaaagcacgatctgatcggagttcatcgaagtagcgtgcataacgtgttcagggggttcgtcgacgtcctcggccaagtcggcctcgccgtggaccggcttgctggacgagttgggcgagatgagcatcttcaataggttgtgaaaagagaaggttctttctctgtcgcgagactgtgccatggtttcggaaggtcaaaaagaaaaagtgttcacggtatagttctcaggtagagcaaggaggatgtgggtgaggcgagtggcgtaggatcgagttgaaggcgaggtgaggatgttgcttgaaagatatactgaggtctttcatgcaacaaatgctgtccttgataataatcgatcaatgttaaatcgatcgaccttgagggcagaacaagatgtcccgagcgaggactagtgtcatgatataaaccgcatgactagggggtttcgagacgaaggagggtattcgccaagatcgataattgtccctaagaatggccaactcaatgctgagggagactagatctgattctcgaatacctccaggatttgaaggtccgtgctttcggagggatctcgatcaagaagaaaaagcaaagtcaggaatgtcgagaatggcaagaaatggaatggagtggagattataaagagtaaagaggaataaaaaagaaggggaagttcggggaaaggtcgacaataaaaacagaataagaagatctcgcatagaaaaggtgcaggggtctctccgatgtcctgggggggaagagagagtgtgggagtgacgatacggcaacccggcacggccgctttgggactagcggcgtttcccttttgaaattttatttctttcttttcccacgttttttattttttcaaattttcaatttccgcggtttttgtgtaattttggcttggtctagccggtttgggatttattcttttctttttcttctctttccccccattgacccccccagtgaccccccattttcccaaattgccttggttagaatgtccggagtagggctggagactccaggggccgtagcactttctgactaagaaaagctggaaatgtgtcctgcgactagacattggttcctgcgctacttgtaccgtaccatggattgtatttctatagatattccgtgtctttatttcggattcttattttatttcgtttctatttctatttctttatctcgatttcatatatatctacaaataaatacatcaacggtttcaccttcaagatcgaggtcaattgattcaagtggaccacgatgaccattgtctgttcagcgctggctatgagggattttgtgctgagactaaacccgtttcaggctcttccttggaaactccccaagctgcgacctctaagattattacttgccgtggccgtccgaatccacttgccaacacaatcaaatcctggtaccgagtactgaagaagaaaaaaatcgccttgatatcttcaccgtatattgtagtgctatgttgtacatcggagaccctcggtaatttttccattgcgtatgcgtatggtcatcttccacttacagaggccattctcatagtgcaacccggtatgaaaaagaaatatttccatccactcgcagattgtgcctgaacgctaagccgtcaaccttggccgcatttgccctagagctaacaggttgaattctcttactcgaccgaaactcgtaataaggaaatgatagctgaaagtataaacgcgctgcacacgcttgtctacatgctcttggcgggtttcgctgagttctcgagtcatatatctgaatgcttcatgttgatttcttaatgcggatgactccttcatctgacgtagcatccgcgggtgacatggaatattagtcatttactcttcctccatcctcattccttccttgtagcctcacaccacttcaatcctccgatgacctaactccggagcttcgcggatagaggaggcttgggaaattggatgttgcatatcgtacaatatacaacatactactccgtatataccttacaggttgtgcacataggtatccatatgtactccgtatacggagtacatatggatacctatgtgcacaacctgtaaggtatatacggagtagtatgttgtatattgtacgatatgcaacatccaatttcccaagcctcctctatccgcgaagctccggagttaggtcatcggaggattgaagtggtgtgaggctacaagacacagagtcgtatccactggactcctaactgtacctcaaaagaaactcttggctctgcttcctcccggtagatcagtcttggtatacatgctgtacatccagtaatttgtagatagaattgattattcccattggctctcatccagtggcaagtcccaaggcagtcctattttctagggatgtccactcagcccttcgccagcacggcctcgttcgacttcgtcattccgaggcgaagcgatttggatcatctagttgggcatacaatcgatctacaatacatctcgcggagtacaatgttgttttcggcagctttgtttatcgtcatccatctccacacaaatcaccgagaccagaaaggaaaatccctctccatgcccgatgacagacatgcacgagcaacctgcattatgttgtaaaggcttacgaagactcttacattaacaaagaacagcggtcagccgcgatcaagatctgccctagatcggctgaccgggcaagatcttccctgcgcaaaccgcaatcgcaaaccagtctccaaagtatatcgcataactcggacaataaaaaaactcccgccgaaagagaagaaaatcttgcaaactccaccagtcaccaaaaagatcaccgatgctgacattcacactggttcccggaggtatgcatactgcagccacaaccccccattcaacctgtagggttatgaacctctgtttagatcgcgacaagcttctcgaatgggaggagatccccccacagtccatctgttcgaacaggcatacccctgtaaatgcaatccaagctcactgcattgcatatcctcgagccgggtgaccgtgggaaatgagttgagtttggaatcgaattatggaagaagcttgttagcaaggcaacggctttgcgacagggattggcctggttcgaagctattgaattcatctagcagttttccctatattaggtttttattctttactccttcttcctactagtgtacttttttttacgtacacaggacaaggacacaaggacgattgtctatgtacagccgagcgatcttcctcaaagaacgattcactgtatttttagtatttttccctcttcttcccaatacggagaaggcagccggggcgcaaaacaccgtttcgaaaatatacatcgtattcgaaattatccaaggatacaagccgcttcctacctcctccgtttacaggacaaaagttcccgcactgacggcaataacgcagacgggaatataaaatttcttggccacccccatcagtccttggacttggacttgggttcccgcaaaaacgggaatgggaaattaaaatgagatctaatcctgagcggcattgcggatattgtggaatggaccaagaaagacccctctctcccgatccctcggagacgttctcccaagtggagtaggggaatatttgtgggacgggatgttctatacgatgagaatatggtttgatgtcaatggctactagtagtagcgctgtgttcgtggcacgatgggatcgcagtggcaatttctccgggcaaaattatcgtggcggccattcaattgacgagtcgcaatctgacacgctctttattacttaccccaagtcttgggtgtaagtaaacgaaggaatagtacgtgtgcccagcgcaataaggtgtgaactgtgcaggtggggatacggactccggacaaaggatggcacgagcgggatctttatttgacgcttagaacgtatcctcctcttagaaccccaaagtgaagcgcaagtgtatcataatagaataccagaatgggttgaccgggaacacaaccggggaagtggagttgttgagaagtaaagagattggatagctgcaagctgcaatgcatgcgcgataggcgggacgggtaaatgggttggaattaatccgagcatttggttagtacggaatacagctgtgtatgaggcattttcatattcctccaccttttgaactactgcactgcgccagatgcagttgcgtacttaagccctgttggcgttctgcgaattgactttgggtattcctgtgaatcctgtctcagacatatccatgttcttccaattgacttcaatcactatcccaataggctattcgcctttcgttctaccataccggaatgtcactgcgatcttggcagatgggcatttttcccgaggacaaagatattgcccgacatgtttcactcgcgcaaagagccatacaccactaatagactaatcgttggtctgtgcaggatgtctcaataccccagatcttcgccacatcaaagaatcaactgccgagtcggactcggatggccaatgccaatgccaagtccaccccgtgcctcataccgcgaacaccgttccattgagcagatctcccccgaacgtcacagcctgaacatcaacctcatgacctccccgccaagatagacctgagggttcacaaagtcatgctcggcaagacaggtggaacgggcagatcactgatccacccagcagtgtacagtgcaaggagatggtcagtcgctctaggccgcaccggaggaatgcttggcgacggcgcgtggtgaagcaatctgccaagatctaggcattggatcttcagaatgcgcccggtacgacgtgagctgtggtatggagccgtgctgaagaacaatgggtatttccggggcgacaatacggggtagaaagagcaagggaggagagggaagataattatgccgagtctccataaagggggttcaggttgaatgattctatttcaatacatgatgcaccccctttcttgaagagatcttggcattgaaaccccttggataaccatctgctccgtgataggattccctcgctgccaagcactgtgctacatatagcgaattctcaaaaaaggactcgttgacgcttggtctcggtagtgcggctattgaatgcaatgtatggggaatggcctcgccaagggcgatcatggtgatcatgccgacacatgagcgtgcatgaatacagtgtcttggcaccgtcttgattatttacgtgctattgtttgtgccaagcggtcgcgcggtcgcaccgagtgacaataatgcgttgagttagggggttgcagtggcagtgctgtgctattttctctcgggatcgacgggctacaggcttggccgtttgactcgttctggttcgattgagattcgcagcttgagcgtcggaagcctatctatggactgcctattacctgactattgaggtgtctagtacggagtatgctggcatagattttcccatgtacaatgaacatggtacctatatatagttagatgtaaggagcacgatgttatatgtacacttcaccgttgagaataggatacgatcgacactggtgttccttcacctcttctattacgaagtatatgttgtagacatacatacgaagtatccaaaaacctgcgtggataaatatagcaacctctcatagcaccgacgccaccttgccaatatcgcggctcttgtcatggctataagccttcatccctgcgaagccacgtcagatgcgcccgaactcttcaaactcctaggcaccagaatactgacccccgacatttctgacatttcaattccgacgtacaatgaatgtatcgccactgttcaacgcaaatcttctggaagcccccgcccatggacctctagagactagaacgtggttggctctcacgtttgatcatcgggtgcgaaatcgacttgccaatgaccgtttcaactgggaggtacatgggaatcccgtgttccaaaacacggcatcggacaccggagaattgatccttgagcaagtccacagaccgcagaacagagagacgaattttgaacggtcgcatctaggtactttctagcccctaagatgaccatctgacagcccccggtatcatgtctacagctaaatgcgcatgacacggcgatgattattggtacttttctatatctccctatgatatactccgcaggcggcatgatattattttcaatagggcgccgagcttgacaggctgaaacacgtttcgggtatcgcccagcgaagcagcaacatcgaattcagaaccagaaccaaaccaacagcattatccaatataccgcgtacagagtaccgagtacaagcagtgtacatgtacattgtataattgattacaaaagaaacaggtgccaattcgagcagtttcaaccgttgtccatcgcaataaccccaaccacaaagcatccaaccacggaaggatccatcgatgatcaccgaaagagggagaagtgcgcgctatcagcgggagttgttgcgagcgacaacagcccgacctacgtaatcgcgcaagaacctacaatattaccgatccctcattcgctcgatcgccagccaatccccggccgatatgacgccgttttgatctagggcgctttgaaggcgattcgagcgggttcgataatacatgttgccggattaaccggtctgtggatctgccaatgatttgatatcatatcagcgatgcgctgtgatgtaccatgggtttgaaaatgggggcttgagcttctaacctacttccaacgtacaatatacgtttcagatgggtcatttgaccttctgaactggtgacatcacggatggagaagggcatggcacgatggctgaacgcgtggctggttactatggtagggtggcttttatcgtggcgtacactagcgatgcggtactttccgagatggttctccatctctactgtacgtcagtgcttgccctatacgatggacgacgttgggcttctaggatacaacataacgatcatagatggccgtgcgatgagattgtacatgttcattagtaagataatgtgggtttcatttattgttgatcttcggagatctatattgaggcagctatgagatatctcatcaatggaattataagacatgatggtgacgctcttgatgttcaatatctgattaatatgtctagactgctttcttctgattcagtatcctagcatatagtaaatttctctagcaccattcgagtcattatccatatgtcaaacctgctctgtcgatttgatactacacaacacgagtcaccggtttccttcgacctccggataattggattccatgtctgaatggaatttctgtttgaaatgttaatttgcatcagtaccatacagaaatatcttgtcttgcttttgccgctgtcgcttcttgtatcccagccagcagtatttcaccgtccatttaccagtatacggcacaaaataacatattaagacactttcacagaagttagggcatacaaagagatgagtcgggtggaattcagcggatattttttggtagttcgtgacttctatgactcctacctaaggcggaaagtggaccttcttcgatcatcgccgagcctcagactccgttggatattccatcacaagatttaatgtatatatactgacaaaatgattcagtagaaacctgtcgggtaatttggatagattgaatagagaaaatggcggctgaaagataatcccgccacatccaacttccaagcttatcctctgatgcctattcttcccctcaatacgagctgaaatttcttactttcttctatctctaacaactttcaatatttctaagcaatggaatctaacccaacatcctctcgctcatttgccgcttcttatgtatccaactcccgcttccatcgctccttcaccatcgaaccaactcctgctcatggccctctcaatgtgacttacggtgattacggccgcgagcccgatgcaaacggaaccactccgacacttctctttataccgggcatgttttcatcgcggtacatcggtatttgtctacacgcgattgccgataaatgcggcgtccgcgttttggttgttgatcggtaggtgtaccagcccttttatataacatgaactaaggtcaacttgtatatagtcccggaatggggaattccactgacgtgccgctcgcgcagcgaatgtcaacctggattgagaccgtcccacggcttttggcccatctagacatccagcatgtttcgttggcgtcgcacagtgctggcactatgtatctgttcaacaccctgtatcactgtcgggatatcctatatcccgagaaaccgatggctaccgttctaggtatgttaaatttcctgcagataattctgtcctttttgtatatattgttcatattggacggctatattccaacttcaaaggccgagatctaaccacatgacagcgccatttgttgaccccgccaaatctggcatgacatccttgaaaatagcccaatatatccccgccccagtcttcaagctctggcatcatatcccacgtctctttctcgccaatgatgcgtctgcaacagcaacgagtggagaaatgattgccaaattctctgcctcctttccctcaaagagcggtgatgaccaggcaaagaacagtctgtacattgcgcagaactatggactagacatagaccagcagaaggagatagactctttgatgatgcagggtatgttcaaagaggacacggttggcgctaacagtgaggcgctacaatgtctacggaaggagcccaacacgtgggacaaatgtgaagactatgaggtctttgtgcgtgagttggtagagctcgaaagaggacgggaggggccgccactgaaagtccaggcattgtttgctgagtccgacagcatgagcggcaagaagggtcaagcctattttgagagatgctggcatcagatgaatgatggggactcagagggtgcaattgaatttgattcgagggtggtttctggcactgaccatgatagcttggtaccgtctgcggaagtgtgggagagcatcttcaagaaaatgcaacgagcggaagacaatatctaaatatggttcttgatatcattagctctacctgggctgccgtacgttcaggtatacatacatacatcgggggctaacgctccaatcattcattatggagctcatgcaaaggcttcagattgaagctgattgtctgtatcggctgctcacgcaacctctgtccataacgacgtaaaatttgaagaatctacgacccaatgtgatatctagacattatatataggatgtacgtgtttccagatgttcttcttatatatctttccactcgtatacatagacaaaaacaaaaacgtaaaccggacagatgatttttctatgtacaacaagggacaactcgtcacgagctgccgaaggctatcgacaatcctgcgctgatagaatatttagatatctagaaaagcgaggaagatacaccaagacgaaggctgtccagaaatagggccatgtgcagaaaaagttacagggactcgaacctgctatgtcttaggagagcccgagcggtatgattcggctgatcgcaatgactccagagaaaggaagaagaggcggaagatctcatttccattgtccagcatcttccgttccctgggcgacccgtttcgccccgttctcaagacctgaacttgcactaccgagcgcattcccaaccggctcgccagcactccccgtcgcgctgttgatagtatctccgagacctcgcccggcagttcctgtcactccacccactgtgcgggtgataccaccgactgtgtttccaagtgtggaggtgacaaatttggcagctccagtggcgcctttgtcttggttggattcgatcggcatgatgatgtgattgatttatggtagatttgagcgtgcttgcagaaattctggaatttcggaatggatgtaagaggataacaattatagaattatagattgtagtaatatggatcgaaagaaacaggtggcagaaggttgttatattaagcgcgcacgctatgacatcattgggtggcaggggtggcagtataggtttatgacttgtaagaatatcagggaatgagagggaaatgtggcgaggtttttcccaagtgtatgcgctcctgccctcgaaatcatacattatcttatccacatggcaggtacactccaacatgtatatcaacaagaacacgcatatgcgacctaggagaatgacttaggagcagcgtcagctccatcgtcttaaagccatggctggtctttcagtgattcctatcttgagcttagagtccgaaatccatcaataatatcagtctcgcggcctggcaagtgtgcggactggctcagcattctaaacaaatgagagctcatttatcttttcaagtgtgtgaataccgaccttccaaatggttgctttcgaattgtcctggacagattgatcacatcatcaattagttgctcggcgagctcagcgatagccttggtcttttaggcctcttgaggtctatcgcttttagatgcaggttcttgatcctgatgcactagacagaagacggacagcaaaccaatctccaaggtgacagcgattcgaccaaccgaaatagaggacatagaattagctcaacttgagcttaaagggtgaaacaacggatgttcttagaggttaagaggttaagagtactatatatgactgcctctgttggccgaagagagggatctcacgcatacacagaaatggcgagtaggatagtcagacaactgcttctgatgactaaatggaaatgtaattaactagttcaatcgatgtgtttcgagatgttcgatgatcaaaaacaacaaaatcgggaacaaaacgccctgcctgtcaaaacgcggtagggggnnnnnnnnnnnnnnnnnnnnnnnnnnnnnnnnnnnnnnnnnnnnnnnnnnnnnnnnnnnnnnnnnnnnnnnnnnnnnnnnnnnnnnnnnnnnnnnnnnnnnnnnnnnnnnnnnnnnnnnnnnnnnnnnnnnnnnnnnnnnnnnnnnnnnnnnnnnnnnnnnnnnnnnnnnnnnnnnnnnnnnnnnnnnnnnnnnnnnnnnnnnnnggttataatttcagaaataagacaaaggaattgtgaaaaatgtgaaagaaaaggcaaaaagagaaaacaaggccccttcagaggcgccgaatgcctcggcggccagaattatgttggctctggcgaacagacgatctctgactagcacgtttgcgtcgaggtgtttgttcggtccgctccatcagcttcacctgctctgtctgctctcgcagcctgcaggctttgacatcacgccaccatcgagtaatcacctcatatgccaactccatcctgactgtggcgatagcacacgcgcgcttatttcgtcgttctataaatgagcgccattcccgttgaataacgatggcggagaagacatgcttcaaaggcagaggccggggattttcagtaggcggcgaatgttctatttttttgggaactctgacggcattccctcgagtttcactcatattcactcgcttcattggctctatttgcgcttcattgggcttggttgttatgcgtgttctgagagtggcattttgcacagctggacgggccattttgatcaccgttgaatgattttctgatttgctttttttcttggtgatggcggaaaatccaggagggatattttctttgccgccacctgttccaggtttatcaaaggttgtcgcccctgcctggaaaaccttcaagttttgctggagcggagctctccgagtagatcctgtcaacggcttttgtggctggcgtctagtgtgttgtgacttgaaggttttgatcccagcatcccctgagatatgtggaattgtgtctttggtttgccgcttgggtgagctgtaaagatccatgaagacggtgggagtgatagagtcatcagacggaatgtatattgtatcccactgtctcgaagactcgtgtctcgacaggctgtgagttcgaccttcgttaagaaaacctgacccgacatcgaggctttctaacaagaagtaaagtttcatactgagttaagagttgagtcaattcctgtgaaagtgaggagtgtgtcgggattgttgtgcagagaagcggtcaggttaatcaagggatagattccaacgcggggaagatgcggggtgagacttgatgttatcaacaagtttgagcaactgtacagtgaggtatggaatcaataacacagatcgaggatagcctgtctccagggctggaacagtcaattactatgagaccatgttgacctgtggacgggttgtccagggcaacacgtgggggtcaacacgtgacatcatcaaaccgaaggatactaggagtacggatacggagtacacacttccccttgctgtacgttcttacgaatgcagatcgttcaattcggatatgactctagtccgatatatgtacttcttatcacttcgccgaagaggatctaatttcatggcgacgcccaaatcagccttggttgcatgatgtcagactgggatatggctcctctacaacataggccctaaccaagaactgatgtttttgttacggcctagtgacacgccattaaccggccatgcgggatatccgggaacctggcttcgtctcctaagtcctgcatccctttcgggagttagcggtttcctgcaggcgggccgatatagtctagagcgccgtcatcgaccgagtgatctccgatcattcttccgaggatactgcccattgcgccactcttcacggtatgaaggcattggggtcaagatcgacatttaactcgagatctagatcgtctattgatgcatctgtgaatgcctagatggatgaatttgaacatatcgggattctggtcacatgcattggtctaatctactccaatttagcaatggacaaggccattttacagcataaaccacttcttctcttgtcctgcgaccgcaagtccaaccttcccctcatcagctagttttgatagaacctgcgatataaaaggccccgccattgcctccatctcgggtccgtagagacttgcgatgatgtcccgcgtcgtcagcgatgcccttgtctttgtgttggccccgataaaagccgataaaacctttttttctcgcatttcccaatgtctgctccagactatgagtttggctggcaggtcgtcaatcacggcaccatgcccggggtatccaactgttatctcttcattgcgcacaccttgggtcataacttgcaaactcttcatatatggtcctagatcttccacaacaacactgcctccatgcccaagcacattatcacctgtgaacattgcgccgctttcctccaagataaagcacatgtggtcttgactgtgtccgggcgtgaacaaggctcgcagtgtagttccttgcgcagtaaaagtctgtccatcgcgaatcgaatgttggccccggtccggatgggccttgtggaccgccgcgaccagatgtggatactgagccagtagcgccgggagaccaccggtatgatcggtatgccagtgggtcagcagtacctgggagatgctcaactgatgttggtcaagatagttgacaagagtggtgagccagatcggacatccctgtcgacatgacactcgtgtttagtctccaggtactaaactgggagggtcaaaatcactcacctgtcctgtatctatcaaaatccgtttctggccactgccgactagatacgtattggttccttgtagttgcatgttgcctggatttccgccgagtattcgaaccacctctgtgctgagttttgcgacagctgggagatatggcagtccagcgtttcgggcagatagatattcctgccaccctggctgcgtccatactttcggaggggacatgtttcttgttgatcgactctggatgtccaggtagatacctaggctttgcgatttgagtaagtagtgttggaattgaaaggtggggtccattcgtcatgcatggctgcctgatataccaggtttttatccccaggctaggactacccgagtctctaaatattcaagctggatatgtatgtatggcttcaatgaaaatctgacttttacgatccgacaagactttctagtcgataatcatcacagtaccgatccatcgcctccaccttccatgtatcccagttcaagatgctaagtaagacctgacatattgcaactggaaaattgaaaatcaaatttattcgtattgcgagggcgggcaaaagagtcagttcggcaagtatgcggatagtcagcctccttgctagagatttgcaattgctaatatctctcgcgagtttggttctacatattaccgagcaattgcgcttgaattaggaggagcatgatcgtcgttctagaagcatcagggatggtgatctattcccaaaatggatatatacagctggcggattataatcgatgactcatcattgtgtgcataactcactagttacatgtctagaaggctcgcttgcatgcagcatacggctcgacagatggacatcgtacgaaccttgttggtccattgatcagattggctggaaactagccatataagtccacatgtatatcgtacttttatgtaacctctaatctcctttaaattacctcgacacccttacttataaaatcatcgtcgccaggaacaagtaagtgggtcaagtctaaattagactctcgtgaccgggagacctcctttccccggatgtgcctcaacgtggccctaggcattttcaacctttaacatttacattcttttgtgctcggtacttttctctttgcccggcgcctgtcgttttgcgacatggatctcttgtgagcgcctgtcttatcacctgttttgtgtcaccactcgcccacctcctccgctgccctgccaccgcggcatgatcccgcaacatggaatcaatcgtgtatgagaactcgcctttggccgactatttggaaggttcgctacgtccgtgacacgcgaggaatataggtccactgacagccgtgctaggggagggtggaaacgaagaaagttggcccgtggaggagaatcagagcgacgatgatcatacccgttcctccgacttcgcccctcgaggggcttccaaatttcaggatcgcgttagaaacaagctaccgaagcctctcaatctacgaggcacaccgcagggggaactcatcgggaaactatatggctcttgctcagtacgcgaccctccacgattgaacaggttcatactaacacttcttctcgctagtccgccctgaacgtccgactaccacgaagcgataataaacgatttttggaacaatttggctacgtcattgtcgcatcgcaactgttgaacgaacacagcgctccttcctacacttctgctgcagatgtcttatctgcaaaacaaccttcggatcttccgtcgctatctacaacttttggggttcaaggcgccattgtcacagctgccacatcattttctatcgcttggttgctacattggagccgttcgaggactgggtcgggattcagtctcaagaaagttggagtgctattgatacttgtgcccgctgtcggtgtctttttctatgctttcgcaaaacggcaatggttgaaatatctccggcaccaggctgttgaggcagctggcgctttcattggaaacgcccaggggtttgattctgctgcgtcggcttctgtggtttttatccaggaggttgagcttgtgtcaagaggctatcggatgtgagaacgtgattctttttgtccaagataagaacaggctaacgaattatcacagaagcactcctctaccgcccatcagtcggctggaagatctagtacaaacgcgacgatgcttgagattgcgccgagcggtttccgaatgcttctactccatgctcgagcgatatattcaatcccaaaacaccttacgcccacttaccgatgagggcgatcttgcgaagtattacgacatttatgacattggactggaagaactcgaagcggttgaggcgtccctgtcgcagcgaactaacgaagaccagtattcattgcgctctctaagggatctatttggaaaactgtacagtgtgagaaaaagcgttctgtgctgcttgctagcccttagcgccgatgggggtggctccgatattacacggtggagttcagctgtcgaggaaatgcgtgagctagctgcggccaccggcaacagcatgctgaaaatgacagcaatcttaaatgaggaggaccgtaagtattaatctgtgttgtatgacacggacgctagctaatattcgcaggtgatatcattcctccatctccattaccttccgcctcaccaagcaaggatcacctgcgtgctcaatttcgacggctcacctctttgtcacaaggggtccgtgccttgcatgctaaaatgcacattgccagcgaggagtcacatgccaatctagaacgcgcagatcctgagttcgaagcaaccctcctctcacaatatgattcggttggaaatgatcttagggctcttcttcacgaatgggaaactggtaaagccgcattggcaaaccaacacgatcgccttagtgccggggatcgctcgcgaccgccaagtactttcttacccatgtcccctacacccagtctgggaggatccacggcagttgagggcagcccaacggatgcactgaaagccttaactggcgaggcccggccggatctgacccagacctatgatgacgaggaaattttcgaagctgttgtattaccggcctcgagaaacaaaagaatgtctttgtcaagagacgagcgtcttgcacgtgtacgagaagaccgtgccagacaggcgattgccagagaaaaggtagatgccagtactaacatgctcaaggaattggaaatggtcatcaagcagcgaccaggaaacaactctgcaaaacgagtcaccagcatctaagacatgcttgatgcattccatataacctctttttttttgtccacgccatccagcacagatttgacttcgaccagcgctagcagcagtgaagtcacaaattgatacccacaacatgtacatatagacggggctcggcgacagcggtgtttattcgaggactattgcttcttgcttctttcttttgtgccattattatctgtttgactgtctttaagtggtcttggatcgcgatcctttcggcattcatctccattgagtgtggcgatcaacgttaattatttgctaatttgtacattacagctggctcttttacgaatgaattatccttccaatatcctaccactgttcattgtgataaaaaaccctagatgtatatgaaggaggccttattgccttattgcctgaggtatcaaacttaacccgaaacggacatatcgccaaacgcgaccgcgtcttccccacccccgaacgcgatccttatattagaccgctgcctctttcatcttcgttcaaatacatacccagttcattattctcgtctccccactactctcttcactaagaagccacactctttcctcttctatttccctacgactcagttaaaaaaaatccccacacaaaacgatcaagagtaagtcggccaactctcaaatcgaaaagattgttgtgtgcgaagaaccgaccaactaacccactccctagtgttggaagcacgattggaacaggcaagccttctgaagcgcgtatgtgatctataccactcaaccaattcagcaatgaacaattactaacactgttgtgtataggtcgtcgacgccattaaggatcttgtccaggactgcaacttcgattgcaatgactccggaatcgccctccaggccatggacaactcgcacgttgctctagtttccatgctactccgtgccgagggcttctctccctaccgctgcgatcgtaacatcgccctcggtatcaacttgctctccctgaccaaggtcctccgcgccgcccagaatgaagacatcctgaccctcaaggctgaggactcgcccgattccgtcaacttgatgttcgagagtccagacacagaccgactgaccgagtatgacatcaaactcatggatattgaccaggagcatctggccatccctgagactgagtactccgccagcgtggagatgccttctgctgagttccagcgcatctgcagagatctcaacgcgatgtccgagtcaggtaagtaaattttcccccgaggcatactcaaacccggtttgcagacacacagatcctctcgtgctaatttcttgcgtagtcgtgatcgaggccagcaaggagggtgtcaagttctcctgccagggtgatatcggtaatggatccgtcaccatccgccaacacaccaacgtcgacaagccagagcagaacgtcgtcattaacctctccgaacccgtcgccctgaccttctccctcaagtacctcgtcaacttctgcaaggcttccaacctgtcttcatctgtcgtgctgcacctctctgatgaagtgcctctgcttgtggagtacggtctgggaagtggccacctgcgattctacctcgctcctaaggtaagttcttgattgttccaaggtcgacatcatggaaaccgagctaatgtgggggtttaacacagatcggcgacgaagactaaacgaatcatccagtggttcgaggggatatgggcaatgttaaaaatgaagctcgatgataatggagagaacttggaggaaaatgttctttcatacatccctgacgacaaggggttttacaagatgttcacgataatttacacattcagcggtcgaggtttcgatctcgcaaatttttccaaacacgcatctttcacctagaatttcaaagatttctaacttcgctacaagtacggattaaaagatgatatcttagatatttcaccgaccattaggccagcggaaagatgtattttattgtgtccataattccgaagaaagccccgacaaacccaaagccaaacccagcgaccgaaacctaacgagcccgcaggcaaaggaccctaaggaacctcgcaaggatggtccacaaccccactaatcagcaaggtcgccaaattaaaacgcttctcagacacccccaacaaaaaaaagaggaggggaagcaagaactgacctgaaaaaaaaaagtgaagcgccatccccaccagaatgatcggaatcgaatgataccatccgcccctccgaagagaagacagaacaaggtatgctgcgtattgcactaaagtgtcatcacacacaatctccgcaccgactctcccaagggcttaggggcaagccccatccgcccgatgtttctgatgtcaagtgcaagtgtgggtaagaagtgatctaggatcacaccaggccctcacgggcaggaccggcgccgacgcgcgaaaacgaacgacggcgcgggtcggggtttgaagattcctccgaatttctcatttgcaaggggtctcgcggctctgggcaggacccagtgctgcgaggacgggctgtgaagctcgccgtgtgtagcaaagaaacgcagcattggtggggatggcgcttgaggaagggaaatttggcgtggagaacggtttgcgggttttatatcgctgtcacgtgggatgagtcatctgtgcgcttgtcccgtttgggaaggtatagggcatccagtgttgtgagttgggttagttgcgctacgaggtttggatggagtgcttcttttaacatcaagttgaatgcaatgattctaattagctgattctcagcaatttgtggctaagtctagagtacactctcggtttaggtcgaacgatctgctgcttgtgctagatttcctcgaaagctcgaacgatatatgtctttccttgaacttctactttctcccccggtgttctccaagatcccaccccctctccatcaaatccgaccaccatcgaaggcaaagagcccgcagcttcgccaaccaaatacttctcattccacccggattcccattcttcccttctggcactaacatcagcgccagacttcttcacaaccagatcaccagatggagtcttctgtcgcgagtgaatctgcgtctggcttagtgccaaatacgtgccccagatgcgaccgataaaagtcttgctaacagtcacctctccttctccactgccgagatctccatcatccgactccagcacccacgaaatacctttattaggtccttctgggccctctctgaacggcaactcccgccatacctcctcatattccttgtcgggtgcgccaggaagatcatgacgaggcatagacccgacctcgagatcatcaccgttcggcaaggggaaaaagctcccacaatcagcaatttcaaacgcattgtgagagtcaagctcatgggagaaagtcacccgcactattgagttggttaaaaagtagttcatattcgtttcgctgaatgcaatggcatcctttggataagggacttacacggctcctgaccctccacgatcctctgcccagcaatcgcccagtctattttgcctgttgccgtttcgatccgcagatcaacgtaccagtccttcacggacatcacaattgtatcggttgtttcctcggccggtgttgtgagccatcggaacgagattcgcttggagaagcgacaggtggactggttaggtttgttgaccatattgttggctttcgctggatgttggattgttatggtaggaattgcctgtttctgtggctatattagatggtaggcgggagctctgctaaacgagatgtctagataggtatgtgacaagagccagattgggaaggttgaagagaatgcccagccatttggttatcttcccctcacaccccgcattcccctccagggacattctcctcacggacattgccgttaattatgatcggttatcaaattggaagattgggaaattgatatcaaaatttgatggttttacattgaattctgggtccatggcaatctttcaatacacaaaaactgggtctcatgtcactctatagctgtaaagaccagcttgcagctctgccccttgggcctcgaagagatgatctgatcatccagcttcatagaagcagtcatatccgaggccaccgtcgtccgataacgagaatacacttcccgaagcagtgtcttcatctcaacaagcgcaagactaaccagtatcagccatcagcaccagccaaccagggcacaaggaagacaactcactttttccccgtacaccctctcccacctgtagcaaacgaaaagaatagcctattcctctcagcagccccctcttcaacaagccaccgatcaggattgaaacgatcaggctcagggaagacactctcattcgtccgatgcaccgaataaggctggcaactaacgatagtatgctctggaacgaagaacccgtcgatctcccttccaccagcaggtacatagcgaggcagtgacatcggaataggcggcgcacaccgcagcgcctctttaatgacagcatcgagatacacatagctatccaagggtgcattgacaggcgcagcggtaagctctttgtaaaggttgtgttggaaatagagattgtgaggttgtgagagctcccacattaagaaacacaggccatcccccgttgtgtcgatgccggccgccatgtggtctttgcattctgcggcggcttgcattagttccaggttagattctttgcgcttgagtttttccattaaggagtagtcgtcgagctcgatttgggcggccatgtctatgacatattggtttgcttttggggcgctgcgggcatggaggaactttgggaaataaggtgataataaagggagatagtactctaggaggttttctgtttgccgttttagtatttatcaccagaacatggaaatcgggcagtgcatactttggagactttgatgataggtcagttcgtgcatgatctcgaagtcttcggctacattgagagatctcaggccgccggggctgaacatgaaatgcgtaacgcagtccagggcatagcagtgaagcaaagactggaagggttagcatttctcatgttggatgctttaatataatgacaacccacgtaaacatccacactcttttggccaccctcgacacacttagatacaaacgtcatggcccgttcgtggataagagccatgggtttttctttcatgatattggtcatggcgtatctatcggcaaagatgcgttttcttttgctgtgctggtgtatattagcactcgaatgttttatttctattagaaatatgtacctcgtccttcaataaagtagaaaacattgtcctaagtctttgtattagtggctgccagctatttctccggtgcaaaggcttacttgatcttgaactgcctgaaaagatcatagtactcggtcttgtcatacccactcccccccgaagcatagatctctttaatcgcatccaggctggtaaacgatagttcattgggactcagccggacgacaggaccatagatcttgtgcaagcggtgaattgactctcgtcgattggcagtgaactcctgatacttaagccacaaacttgtaaatcgagtataccacggacccggaattgtagacaggggcgagaagaatccgcgtatgactatatacccacaaaggatgatagccccggcccacagagacagcatgttgtcgtatcagagagctcctgggtgatgaaaagtttctcttgaagaaggccgaatgtgcaatcctacgcttatttataccatagatctgattgaagcatcaataattcccattagataatagacataactttggagatttgatagtctttgcttcaacagttaggatttgccgatatcatcgttatcggagtgcggggaaatgcgaacagacttgggtttgggttgcgataagatttcagactttaaaccaaaaagggaaatctgaggagatggtaggatttgaaaaaaagaaaggttattcccaatgaatgtcacttgatagttatattgtagctaaacagccttgtcccgatcttgactgggattcatctctagaacgtatggcaggggagataaactgtttatacggcagacgggggaagatgaatgcaaaagattatgccgtagccgatcacttaagacattggatatctctaactgcattcaaagattcactggacagcccatatgtcaccaagcaacctctcaaacacaagtttatggctgcagccgaagccaagatcaaattcacaaaacagtttgaaccaatttcatgctgatggttgaaagctacatatacaatgatattattatatggagtagtaatcaatcaacggtgcattaagttacaataatagcctagtgatgggggtaagggtgaactatgacatcacatagattccctttacttgaataccataaatagaactagacttgtgccagtgcctcgttgactatcaacaacaacatagtcgagagctggatcttctatagtggagagcttcctaaatttggtgtcgcagtattgagagagctagtatcgattttatcattcattacaaacgggctgcagtcctaaaaagacaccaccaggttaacgagttggatatgctcgatcatgagcatataatctttgaaatatgagacctcaaaagtaaaaggtcaagacctgcattccatttcattgttgggcttgtctttgccgagataccctgctccggcggcctttccgttgatcggatccgacgctagatgaccgatccaatgtctcacttctaagggttcttagtgggctgaatgggggttttctagatgttgccgatactccaccaggttagaaacacgtccatggattttgtcaggcaattctggagatgtattggagaagactatggttatcggggtggattcgcataaatgcttcgattggcgatgtgttggcgttgatcaacacatggtttatgtatcgtactctacacaaattccttggtctgaatctgggtatttcgaacaatgatggagcctttagccggctgtacctaatcggaagaaagtggaccttctcgacgtaaggaatcattcgcacatcatggccgatcccggtgcatagtgctttagagatcctgcgaaagcacctaggttccgaagttctaggccgcggagagtgaaagtgaggaccaaaatagagccatggaaatgaaagtaagatcaaacagggatgatgtaattatatttcagtaccgaggtacagctgtacacacgcacccgcatgaaccaaggatgacttggtcaggggccatggttcagacaatctttaaactgcctcagccacttttgtatcagccacattagtgagatcgtattccagctctcatatgttattacaacatacagcatgcttcacagccttacctccacattattttctgcggataggactcattgtggcttagactaactaattgacaggccggtgtcacaggttaaattggcctgagatcagggtcttacccgtggactccagccctgggctactagcacgattaagtaagccaaatagaacacctgcctagtgggcccggcgggcatccgcccgggcgtcgtcgatagcctaaggcgttgaaacagtcgaataaaggattctctctttaccaattagacgacccaactagaagagtacaatatatgtaagacacacaaaagcaaaagaagaaaaaaaaacaaaagagaatcctaccaagtacggagtaaaataaaaaaagtctggactcgactaagtttggtacctgtcgcatgtcgatggggctactccactgccgattcaggagaaaaaaggcgttggaatgcagaaatagtgtggtggctttgtccgggttggagaaacagcttttcagggactctacggtgcatctagaatgtttgtagtaagcagagtcccgacttgtggttattccgtacatagtgtacttcgtacactccgtaggagcctgcatactgcgtatgtgtgacccgccccatggtatgtggacaactttggttgaaccccagatgtgcccctactttctctcccgtctcgaatccggccttttttccttcttcaccttttcttttttgtcactcgttcgatatttcctccctttttatttcaagggttgaatcagctgtacggtcgctgccacaacgcattccctcgattccccgcctcacaattcggaactctgcgggataaaaaaaaaacacaaactacaacatacggaataatacctagagaaatcaccgtctatctttaattcgactcaactggtttgagctgtctgcttgacagtcggatgcccctgtcgaggctttcctgcgtctaatcacacgtctcctgacgaatcctggcttgggccaaccaaattgccaagccacagaagcacacgagcctccgttgtgttttaatttgcccttcccccccgtgtcgggcctatttcccaccggtcttataaagcgaacgccaccgtcaggtggttacaccgtcgccgtgtctttcactaaccatcccgccgacctgagctccacgacggagcctctcggcaagattccttcacacgggtcgcgcgcctctctcctgggggggtcttttgatcctgcctttcgacgaggtcagggagggttccgcgcacgagagggatactctaatgtcactcctgtgacccatagccccaggatgtatctcccaaatacatattggacatggtcctttgcgatcgtcacattcgtccaaacaatcgtgacactcagccttgaaaggtatgaaactccaccgatgcgaacatgggaaatcaacattaacgtcgccattctttctagttacatcttcgcgaattttcaattgcaagaactcccaaacaacagccccgcctcgaaaaccatccctactttcctcgccctctatggcttcggtttcctctacgaacttgtgctggtatacgatgctctgcggatgaagaatacaattcaggtcatcggactgtgtatctgcaatgttggtctcctgatttacggcgctgttcaagtgaagcaaattcgagaggccgtctccaccttggccttgatgaatatgatcagtccggttgtctgggcccagtcggagccgttcctgatcatcattccgtgcatcgtggcattagggacattactgatcactttcgtcgcttataagctgtacgacgagtttgcatggacaatctacaagcatatcagtgctgatctgcaaatgaagcgtcgctatctcacctaccaggtttgtgttccattcgacttccccatcagcaacacagctaaccggtcactaatcagatctatatcgctctcttgaaattcgatttcttcttcttcctgggctttactgtccagttcctcgtcttggtctcctcgactagcatggacgttgaatttgcgcttacggtggctgccatccccgtgaccattatcattctggtctgtggcgcctggtttgtgcgacgagaaaccatgactggcatgatcatcatcattgtaagtcgaataccagcaacgttgattcaccttctaacagtcttatccagctcctcttattcgccgcgatggggtatttctgcttcaagctattccgaatgtactccccgcagacttacttcaaatacctgcccgctcgaccatcgatgaccttcttcgccgtcatcaccttatttttgattgtgatcactatcgtcaacgcctgcatgtgcgtccacaacttcaaccgcggtttgaagccccacatcaacaagaagaagaacaaggaagcagaaaagacaaccgagctctcttcgaatcttacccaaataccatcacggatgatgatcgactgatcacccggttcgcaaaagggtgctctataagtaattttctggggcgttgaattttggagcgtcctgtctttttttaatctgcgaacttcgtgtccgtgtggacaccttgaatttagcctgatctctttgtgcatttttctttctttttcctgggctttcggctcagcatgatacctcatttccgtcgaatctgctctgtccaccatctcccattcttcctgactctgagctgtcaaaaatttcctgtcattctattttccttggttccctttacatgttcatatccataccccataccccatacccctgcacgagtgcaccgacggcgttatctgaatgatttgattcccggaggtgtcctccatgtcttacgacagccatcgatgctttttccgatgaatgtgaattagtctttctcattagttcaatggacttaaagcacgtgaatggtattttagtagctatatcgatagaattgaactttctacctccgtgtcatacatactttgtacataacatagactgaggtcagttgttcactcgttaaagaaggtgctagttaccccgtacatattgtagcaatatgcgccgagttattctgattggtggatatttttgtactgtaaatactggtaattatcacctaattcgcttccaactgccggggttgacatgtcaaatacggtattaccccgaaaaccgcgatcgtggcctcaactccgcaaacctcctttcagaccatctcaggctcctccttccctttcttcttgaactgcatttccatctctcttttaatctctttttcttttcctttacactcttctacacgcaattaatcacaatggtaagttcatctccccggacccgaaccccatcaaccacccatccgacgatcaagccagcttgccccatccaccgccaacccattgcgagccctcttgcgaatttctcaatcccacaattaacataatgcaccactaggcctccccccgcccagcgtctcccctcacctcaggcgccgagtccggccctgactcaaagtcaggtgccgccgcagccactggcaactccgtcggccgtccttcctctccctctactcccggcggtcctcgtgctgccatgcgccgccgtgccaccgctgaccataaggagaccctgcgcaatgcccgtcccagctccactcgctctgctggcgccggtggctcgtccggcaccatgctcaagttgtacaccgacgagagccccggtctgcgcgttgaccccgttgttgtcctggttctgagtctaggattcattttctcggttgttggtctgcacggtaaggaatcaccactgatgatgtgaatgtttggggtcattgtttgattggttgctgatcgttttcttctctctagtcatcgccaagatcacccgcaagttctccgcttaagcacttgatcagcctcaattgcgcagttgacatcccgttggattttcgcgtacggtctatctatctatctcgggcgttgactgcgcgctccccgacctcgaatcctcctcatcttaccgcctcatttcccgactcctataccccgtgacccttgggccatttctcgttgtggcgctggaaccaaatcaacccttccgaaacaactggcgtgattccgttttgttttcattttgatgtgtatgtggtgttttcatttgcgttgaaaaagagagttactcaacgacctatctgctgtataggtcattctagatagaaccggcctgttcgtgtctccgtcttgactttctattttacggccattggctcgtttcctagcgatatcaagcgctggaatatgccgtggatgtgctagttcggaccgaaacatggtggtatttgttctatccggacgcttgtctgtacaatataaagaattgattgaatctgttcctagaattagacctgattttctagtggctgaacatgcatataaaccaccaactcttgcttcacgtcattccggtgtcacaaaaattgcagaacccgcaaacccgtcattttggaactcgtctagagcttctagttgttttctgtagacccaaatgccttcgtttcataccaagggatcccaataagcttctctcgaccgatcaattgcttcattgctattgactgtgtagttgataatgcacttgacaattcgttcatccagatcatccagatagcgacgccgacaaacagcttcgcagactttgcaatgtttagcataacgtgcatatgacttggaattggaggtatcacacgcaccggacatcgcatagtatagaactattatgggatttcaaacacctcccaggatcaggccaacatcccctataaacctattggtaatcatgcataatcctaggagagctgctctatagaatgaagaaaggcagcggccttaggggacatggtgaaaccatcagcagcttactgcaccagaggcaactcctcgccacaattcgattcgttttcagtggagccacatcgaagttggtctctgaacgccgggattgacccgttccacctcaggttttacatctgcttaacttgatgacaatgaaagggtagcgacatgaatgtaaggacaaaagtcatgaatatatatagctgagcggaggcaaggacgaacttttattctggggaacattagggttttataggaatggctaacaaaggaatgcgaacggaccaggcaatcatggagcctataatctatggatttcaataacctggactgcagtcattgtacaaccctctccatcgcctttctatcactatacccccttccccttcaatatggcgtccatccatctaggatatagcagcgggttgtagttggactatagctctcgggaaaaaaggtcaagaggaacctcaaaatccatagtgtctgcaagaatcggagctctagaccatgccacaatcacccaaagccagttcccagacgatttagatttgtttaagagttgataacaaccttatctcttaggggtcaatgcatatcaggtggggtaccttggggtctcgaattaagctacgattgaatatggtcaccttgtactctttttcgctggtcaaagattagatgtaggttgtactatagagcagatatgtatatatcctccttttacacctgatttcatcgaatacaaattgtattcctgatggcaccatagttatatactttgtaccaggtcctgaagctcgtgaaacagaaaaaagatatgtatatcttcaaacttcaaacttcaagattcaacgattagataaataaacaagcatttaacaggtctttgacttggtggcacaatctaggcaggacttgaggataagcagtctatacccccgaagtcgggagtatgatatactatgatgaatatgataacggacttgattcacgcttcaagaaaagtttgattgagagcaactaatcgaggcaatataatgttgacagaatttaaagtgaacgtgggggagatagtggatcatatacggagtaataaagtaataagaatgagtaaccttggaacctttcactgccaagcatccttggagccccgggataccccgatatcccctaaacatctgcgatccgtttacatcggcagttggcactggtaaatgtcaaacgtcgcgtcgaacagcgcgagtttgccgactcgtaaactcttatcttacatgttctccagccaatcacagccacccagccatatgtacccttgacggtaactgataacagtcagcgccaaccaatgaccgacgacatgtataccctggtcaaaaccttcatgcttcacatcagagtgactctttgaaatccccgcgcgagtgctccattgtgatgttgatcccctaactctagtggcgtacttagacggtccatatccctactatgcgcgccatggtattacgagagcatgttgtccttatctggcaatcagaatggagcatccctatctaagcttagggtcagggatcgtcatgctatactcccgtaccccagtgcgaattcggagctgggggtccataccatgcttctgatgctatgtgcccggacctatatgaggttgctatcctcccggtctgggaagcttgatatcccatctgccaagtcagggttggaaagttatacaaggcgtactttccatattaactggagcattagtcgctgactcccaattcaaggcaccttgccatctttcatatttctgttgtcataaaccctcttgatattcacgtctacgacatgtcgtccgacggggttattttcacagcgcctttgtctcagagctttggatatggaattatcttaggcctaggctttgcctttgccctactgatgatcttcattacttgggccttgaaacggtgcgtctctatgccttcatcgatatcacccacataagctgacaaaatgcatccatacagctatcagaatgaagtccaaacatccgagatgttctcaactgcaggccggtccgtcaaatcaggactggttgcagccgccgttgttagtagttggacatgggctgcaactcttctccagtcatctgcagtcgcatacaaatacggtgtctctggtccatttttctacgcatcaggttagttccggcggtatgcgaatgatctgaaaagctctatatctaacagtatgtgtataggcgccactgtccagattctcctattcgcaacactagctatcgagctgaaacgccgtgcgccgaacgcgcacactttcttggaagtcatccacgctcgctatggaaccgtcgtgcacgtagttttcatagttttctgcttgatgaccaacattctggttactgcgatgctgctcaccggtggctcggccgtgatgacatccttgactggagtgcccactgcggcagcctgcttcctgctcccaattggcgtggtactatacaccctcttcggtggtattaaggctacttttatcacagattacttacacaccgtggtaatcctggtcgtcatcttcctcttcgccttctccgcttatgccacaaatgccgagctaggatctccatcaaaggtgtatgacgcgctagttgcagcctcccagcgtcaccctgttgagggtaatgcggaaggcagctatctgactatgcgctctaaggagggtggcgtcttctgggtcatcaacatcgttggaaactttggcacggtcttcttagacaacggctactataacaaggctatcgccgccagtcccgtccatgcattcccaggatacgtcattggcggcatctgctggttcgcaattccctggctatgcgcaagcacgatgggcctctccgcactggcactagagggcacgcagcgcatgagctccagcgacgtgagcgccgggctagtgctcccctttgcagcagtcaagctgctcggctatagcggtgccgtcgccacaacattgatgatcttcatggccgtgacatctgcgttctcagcgcagctgattgccgtctcttcgatcttcacctacgatatctacgcggcctacatcaacccaagcgccaagggcaagagacttgtctggatctcgcacatgtcctgcattgtgtactcaatcatcatggcgggctttgcgacgggtctctactacgccggaatcggcatgggatacctctacctgctgatgggcgtgatcatctcctccgctgtcttcccaggagccatgacccttctttggaagggccagaaccgaatcgcagcagccctatcaccgcccctcggtctggcagtttctctcattgcctggctagtgaccgcaaagaagcaattcggaaccctaaccgtcgatagcactggctccaagtaagcattcctttctcaacatccatactgcaaacccaaacctaacaaaccgccacagttaccccatgctagccggcaatgtcgccgcccttctcagcccactagtcttcgtcccagtcttcacctacatcttcggcccacaaaactatgactacgaatccatgcgcgctatccgcaaagtcgacgacacagaagtcgccgccgccgctcatgtcgacctcgaactagttcccggcgagatgggccccacgcaagatgagagcgaagaagaaacacgcctgctcaaccgctcggcattctacgcgcgcacgctgacagtctttatggcacttgcattcctgatcctctggccgatcccgatgtatgggtcttcgtatgtgttcagcaagaagttctttacgggatgggtggttgttggaattatttggttgttctgtaccctgtttggtgttgtggtgttcccgttatacgagggtcgcgcgagtattgtacgtgtagtgcggatgatgtcgcttgatctggtggggaagaagcccaaggtttatcgaggaacgaagggcggtgccgatgatgtggctacgccttctgggctggcgacgccgacggatacgcttggagaaaaggataagcagaccttggagagggaggtttgaggcttttcctggtgctatctttactggttcttttctctgtgcctttatcttggcttaatatcttgtttacggctatttataccctcctactactgaatctcaatttcaacttcatgtgctttattattatgtgctccaatcatggtagcaagtgagcattttataacaaccttctatattcttatgaggaatagaacatgctacgccgatcgaatgggcagttcaaaattcaatagcaaaaaaaccaaaaaaaaaatacagttacccaacgccaagggtaaacccacgatattaagccggaatatgtgtctcctgataagcccttcttctgcctcacaatcccgcaataattgctgcatccttatgcctagtagaatttgaacattggaaactcatttgtatccaagtccaccctgtgcttgaggtggaggctgcagagggggctgttgctgccagcctccctggacctggggaggcggctgaatgccgtattgcatgcctggcggaggtcgcgtgtcaggcgtgatatcgggccggtcactgatgtaatcgctattagtataactatcatttgaatatatttgggcaatgcttaccgtaggtcttgggtgtaacggcatgtgtgacattggacctcctatatagtacgttaacgatagagtcaaaaggtgattgatacaggcatatttaccttgtacttgtgcgtagcaaggggaatcactggctgtagcgaggtaaaggttagatatcttgagctgttcgtcaagacaatattctggcgattcataacttacaatgaagcagacggtgaaaaacggccttgaagaattattagtcaagttcaaattattctggtcaggtcctatgggccagaaacataccatcgggtgatgcagtaaccattccaatgttggcctagaagcggagaatcaataacagggccgatagaccactgacgtcagaacttacagttgtagcagtatgcacgaacattctcatagccctcgagctgagacgagaactctgtattcgtggtcagtatctttattcaatacgactgagcaacgtcgacagcacggatacccgtcagggacagggtccactctggtttctggatcgtggggtaggaagacttaccatgtgttccaaacgtgatacagaaagccatggtaattgtgagatatggagaagttggcacacaacgaccgaagagaatcaacagagagttgagaggctacttgcgattgaaagtcgattagagacgaaggcagcggcattgggggtgtggcgctgtggcttggcgggcttggcaggtaacacgtgatgtcagatgtagtggtgcatgattggccaagtgcccctgtataaaaggcacatgtgattattgattccagcagggacccgttgactatcagtgattatacatgtacatatgtacattttagtaaattgtctgaagagtctgcagtttttacctaggacctaacctcgagcaatactttcttttggtgttttacgtgttttgggcagatgcgcttaattcactaatggctattcaccataggataacagccccataaaccaaatattagacaaaagagtcgcttgaaaacacatttctccggatatcacctccccatcggtgtagaatgccgagcctagacacatcaatcacatttattgggtcttgaagagcagaattgcgcagtgtccgaggtagaagtagatgaagtgcttagtctctgttgaacacatgattagtatctgattatcagcataatggttctagtatccacaaaccatgggtaacgaagcttccaaagttacgaccaacaacgcagtgccaggtggcgcccttgcgggagtcgaactaatgtatggggttagagatattatcaggcggggtagaatcggggtagaatcggcgtacctctttcttgatatactgggcaatatcctgtaactggttattatctaattcatattggggatgggatttgaggagtgcgtgtaccttttcaactctgaacttctccatggcctcaatggctggggggtaggttagctttgtttatctagggcgctctcgaagtttcataccgagggcaatagcctcctgctgcatatcctcggtctaaaaattgtgtcagaatcaattggctatcgtagtttcgcatgagtgtccttaccatgtccacagacttaatctgcgctgcacggagcgtttagcacttgtcactggactcacgaaggataaacttaccctccataggctccttcttttcagctgggggaagtgccattgtgagtgattcctgtatcaaaaaaacttcgaagggggggtttaggtggtgcgccaaaaaagagacttggtagcgtaatctcgcgataacgtacgttattgccggtggacaagccacaccgcctgcccgccagaccgcccgcggcactatgaaagaagaaaaaaagtttttctcgtagaaacttcgagtcttcacactactcaccacaaaaacccaaaatggagagcactagagtgttcgtgggtggtctcccaccgacatgctctaatgatcagctaaagaaacattttgcaactcgctttcaagtcaccgatgctcatgtcctacctaaacgtaggatggggttcgtcggcttcaaaagccatgaagcagccctgcaagctgtgaagcacttcaacaagacatacatgaagatgtcgaagatcgctgtagacatcgctcgtccggtatgtcgattctcagctctttttgcttcagccaccctactttcgcctgtgcacgctgaccaattaaggtggtcttgagactgacccgtattattgcagattgactcaaatgacgctgaggatgcccaccccacacgacgacgtgatgccacgaatgataatgatgcatcgttggataacaacctcaagcgcaagagggacggcgagaacaaatcacaggaccctaagctacaagagtacctctctctgatgggatcatcatcgaagactcggacatgggccaacgatgatgatatgatcaagccgtcagtggacacggttcccgttattaaccaacccgcgcaggaagaagagcagattcaggacctgccttcacacccaaaaaaggcaaagacagaaaaaccttccacggtagcaacgcctgagcagcctgagcccatggtaattgacaagattgaagaacaggaggctcaagaaacaccagaacaggacaactctgcggagcctgaagaggagactagacctgtatctgatgcagattggctacggtcaaagacgagtcgtttgttgggccttctcgatgaggaagaacaagatgagtttgatcaacacaaggccgccgcaccgactactgcgccgatcaaagctcattcaccaccttcctcgtctggcgatgagtcgcctcagcgtgacgaagaatcgcgcactgcggccattgagaaaattgcgcccaacacgactgacgttgacagcatcaccgaggcaacgccggaagatccgaatatcgatcttattcggaaatcggcccgtttattcctccggaatcttgcctatgacaccacggaatctgatctacaaccgatttttgaacgctttggaaagattgaggaggttagtacttacctttttttgctttctcaaccctgccccgcctttcccccagtgcggcagactggctcacagcctgtttgttacgagtgctcgtatgatgattttcccgatagggacatccgatgcaaattgcaaatgatgttaccaggacaagatattttagtagatgcttcttgactatctgaaagagccaactcaacccacttttccacatttacacattatattcaatgaccttgagtactaattgaatatagattcacgttgcttttgacacacgctccacaactagtaaaggctttgcttatgtgcaatactcgcatgctgatgcggccattgaggcctaccagacccttgatggcaagcatttccagggtcgtctgctccacatcttgcctgcttctgcgaaaaagacctacaagattgacgaatacgaattgtcaaagcttcctctgaagaagcagagggagatcaagcgaaaacaaaacgcctctggatcgtcatttagttggaactccctatacatgaatgtgagtttacctcttaccaccaccaatcaaaaggttgagactaatttcgctacaggccgatgctgtgatgtcatcagtggcctcaaggctcggagtctccaaatctgaactgcttgatcccacttcttcagaagccgccgtcaagcaagcacatgctgaaacgcatgtgattcaagaaactaaagcctactttgcttcgaatggagtaaatattgatgctttcaagcagcgcgaacgtgggaacacggctattttggtcaagaacttctcatatggtgtcacgtcggcagagctcaggagtctgttcgatccatatggcaagattatccgactcttgatgccgccaagtggcactattgctatcgtgcaatttgcgcagcctgacgaggcccagaaggctttcaagggcatggcataccgcaagataggtgattctatcttgttcctggagaaagcaccgaagaatttgtttgatggttcagcagctccacccacacttgctccagagactcggggcaaggatcaaggtttctcaactgcagacacatttgccgcagatgaacctgatgacagcgtagcaactacgacactcttcgtaaaaaacctgaatttctcgaccacaaatgagaagttcctggaagtgtttcgatctctggatggctttatcactggtcgcatcaagaccaaacctgatcccaagcgaccagggcagaccctcagcatgggattcggctttgcggatttcaaaaccaagggtcaagcccaggctgctctttcagctatgaacggctacaagttggatcagcacgagcttctcatccgcgcatcccataaaggcaaggatgccgccgaggagcggaggcgcgaagataccgcgaagaaggttgcagcgcggagaaccaaaatcatcatcaagaacttgccgttccaggccacgaagaaggacatcagatctctcttcggggcatatggacaacttcggtctgtgcgtgttccccagaagttcgatcatactgctcgtggtttcggttttgcagactttgtaagcgctcgcgaagcagaaaatgccatggacgcgttgaaaaacacgcatctcctggggagacgattggttttggagttcgtgaacgaggaggccgtcgatcccgaggaggagctcgcgcgcctagagaagaaggtaggagagcagatggacagggtcaaacttcaacagcttactactggcgccgggcgcaagaaatttactgtaggagggcaggaggaagagtgaagccttcgttccttctccctttgacaaggacacggccatggattggctcgttgacatcccttgcagggaaaaaaggtggattaatgtcccatgtacgattacttgcatactaccatagctacaatgtggaaataaaaagataccccgaatactgttgaacacgttctttgcagctgtcaatttccctgcagtcccgtcctcgtgcgtctcgtgccctcttgatccaggcgtaaccgtaaccctactttaccttactgtgcaacacctttcttttctaccccacaacttcagctaaaccgccttggatcgcagggtcattttacctagcttagcttactcttttgatggtacgcaggactatcatcaacagagatcagccaagcctgcattccggtggtgatgtctggcggtggtcgagcattccacgtcccgtgccagaagacaatgtagttggaccatcaacattcctgcaacgccatgattgccactgattattgcgatcttttgttgatgcaggtccgagcgatggatgttcaaggtcacttcgcgctgcacaaaatctccgacccactcatcactggttcgtgctgctgagcatcccttgcatcctagacaacttccttcatatcgagccctgtcttgactcctgatttgctgcggcagggtcggcttgccgtcgtcctttggttctctgctctccacacagcgcgcgcaggccaggatcgggacctgcccaggagtatggacaaggcgttcgagggacgtaggccaggcaaagaagacctggcggaacaatgtcgctactggggctacagtacccctctccaaaggggagtaatggttccatataaacaccatcttgctcgctcccacattctctttcccaggttcttacattctcttgacatcttgcgttcttgggtcgttgtttgtgactgagctgcgttctttgccaggcagtaagcatttgacggtgcctctcagttcccctcctcattggaatctgtcattcttttcgagagcccgtccttggttccctccccatggctactgactggcaacccgagtgccttgtcgctcagaaccagccgtcactggatcctgtgggagctcattctgatcgagctctgcagaataccactgggaatgtccagtcttattcagaccaattggctcatgctggtgtcactgctcgcgatgatcagtttcatcaatatagcttcaagtatcctcatggccctcatcctcaacccttgtcagcacctggcttgcatcaacagcatgtagcggctcggcttcatcaacggaagcttcgcaggcttcactcggttggacccaactctcagtcccgccgggcacaaagcagctatctcaagtctcagaaatacatggagtaccgacgtcgccctcgtcgtgatactggaaaagatggagagccagtgtggtctgatgaattggaagacgcttttcagcagggtaggttcataccaccatagtgatagatgaaccagaggctaacaaccgatttcagctctcgaagcaaaccctcccatgggtcgaagaaagtggtccgaacgtggcaagtcatatggccgcaacgagctgattgctgagtatatcttcaagttgactggcaagcggaggacacgcaagcaggtgtcaagccatctgcaggtcctcgactctttcttgaagggcgatcccgattgtgagttctcaaatatgaaagatgtgtatatcttctttttaacacagtatgctaggggagcgacttgtccgtgagccagcattagaacgatcatcgagtgttcatggctcagcacctgctccgaaatggagaacggcagtagagcacccctcgggatctagccactacggcagccacacacacccttcataccatgaccatatgagatctatgcaaccatatgctggagatctcccaccgccacactatacgcttgggtccaacatgcaggagactgctgctagcaccattcatggctttagcttcgacatgtgggtcagcgctcctcagcaggccaatcgcatcgacaaggcattgcatgcatacacccgtctgcagggtgatctgcaccaccccgttgcaccccccatgcctcttgagcatgtgaacgggtggcggtcttctttcccccaactggcttctatggtggatgacgtcaacaatcccctggattgcgatatcatcttgttagaagtgaaccttgagctaatgaccgacttccctcctactggctcacgactgggaatccagctcgatcttgactacggtcaccctagtgctggcgatgttttgggagtcagccagatggacaactggacctgcagcacgcatatctaccaagatagccagaagctcctagagacttaccacgacctacccaagacacagtcaactaaggtcaagcccctcttcgaatcatcttggtgggctaagctgttcactcagttgactcaagagaaacgtatagccgaggactcaggaaacccccaagctgctcgtgacgctgatgaccatgcccgtcaattcttccgctcattgtctgcagtgcaagagatccgtgccacctcgcccagctcctgccgtctgtctaaccaataccaaggccatcacggcgatgagagcaagcgcatggccgttctggcctggaagttccgacaaaccaggcctggcgaagttggcaccaccacttggagacgactaataccggcaccggaccggactacaaccaacagcccgcgcccagcctccgcggtcgatcgagttcctctctctctggattccatccttctcaacaaaccatcccaccagggtatttaccaagcccctcatcctcacgacctcatccaccaccccagccaatcccaatcgcaatggcccatgtaccaatcacctcatgacaacgtgtctaatctctataatccctccggccatctggacttcatgtcatccatcagcaaagccgaagatggactcaatgataaaatcgccgtcacctcggtgctggactccttctccgccagcctcgcacccgagagcatctcatccacaagtctccacggctccagcggtgcacccgtcatgctcaacgtgcatgacctaccactcacccacccagggatgggctacacaatgggccacgaaacatcacattacgtgccatcccaacaccacagcgtgaatatgcacgacagcaacagcgtgctacacggcttcttcggctctcacacgcaaccgcttgatgacctcagccacggccatgggtcgtggggtacgcactccacatccatacccggagacgtcggcgccggcagctaccatatcccttatcaggccgagcaccatggacctgtctcgcgcgagtcgcagcaaccacaccagttcgacggcctcttgccatcggaggacctaatggataagatcgtcgggcgcatgtccaatggttccggcatgcatggggcgggccccgatgcgggctacgataacgccactgtggatgcggtataacgacatattttacaaaaactaaagtaattataatcattctgggagtggtcttttgaaattttctattcctctttctgtctttctttgtgaatgtcttagctagcgcccggagaaagaatactttctacaccaatcacttacttctatttacattgcaatttccctcggctgaactcctctcatcagccactttagccgcaaaacagcacattttaggaccaactgaggtagattcgatttagcctgaacctttaaattttgtgtatattttcaatattactaggtggggtcctatatatacccctctatgccccaatttcttttttattttgttctcttgagatctcgttttcacaatggttgcccctactgtcaagcttaacagcggctatgagatgcccatcgtgggcttcggcctctggaaggtcaacaaagacacgtgtgccgaccagatatacaatgccatcaaggctggttaccgtctcttcgacggtgcctgcggtacattcactctctccaaatcaagccctaattgatactaacactattgattccagactacggtaacgaagtcgaagccggtcagggtgtagcccgcgccatcaaggacggtttagtcaagcgcgaggagctcttcattgtctccaagctctggtgcagctttcacgaggccgacaaggtcgagcccatcacgcgcaagcagctcgccgactggggcatcgactacttcgatctttacatcgtgcacttccccgttgctgtgaagtatctcgatccatcagtgcgctaccctccgggctggaccaccgccgaaggcaagatcgagttcgccaacgcaccgatccacgaaacatggggtgcgatggagactctcgttgacaagaagctggttcgcagcatcggtgttagcaatttcagcgcccagctgctgatggatctgcttcgctacgcccgcattcgccccgccaccctccagatcgagcatcacccctacctcacccagacccgtctcgtcgactacgcccagaagcagggcatcactgttactgcttactcttctttcggacctctgagcttcctcgagcttgaccttaagcatgctaaggatactccgttgctctttgaccatactactatcgccaccattgccgagaagcacggccgtacccctgcccaggtcttgttgcgctggtctactcagcgcaatatcgctgttattcctaagagcaatgatcctactcgcctcgctcagaacttgaccgtcactgatttcgaccttgagaccagcgagcttgaggccatcagtgctctagacaagggtcttcgtttcaacgaccctgttgctgtaagtttgttacctgcggtgtattgactgttttgactgttaatactaactgttcttttctttagtacggcctcgaaatccccatcttctaagtgcttgcagactcaaaagcccgggagacggaagaatctccgcgatataatgtcgatttttatagcttggataaattaaaaagaacatatcaattccaaaaaattctaaatcttcagatcttctatattagctagagtagcatgcagtcttgttgtactaacatgtacatagataggcaattccgccaagaagtgccgatctcgaagatccgccatctttctccaacttcggatgtcacgacttcaacttcccaataacacaactctcacaatggtgtcccctactctagcgcgcatgaccgcacaggttcatataaccgcatttcccatgccaaaaaacctatctgaaagcaagcttgtactggccgcgctccagaagtttggagaggtaataacataccgcaacctcaaggtacggcggcgccctctctaaattatcattcagacgagccccgatttaacaattgccttagtatgacacgaccaacacttcaccaaaccctaaccgccccattgtcgcgatcttcgagacagccgacgcagcagaccgcgcgatagcagcttcgcccataaccattcccctaccgacatccacctccccctctaaatctcaatcttcaacctctattccattcacatcaactaccaagccacctttaaatacccgccgctcactcatcttcgaaattcaacactcgcgccacaaccacgcctccgccctcaaacgcagccccttctactctacctataacctcttcaaaaacaaccccatctacgaagatctgatcagcgacgagaccagtatcccgctcaaagaactggctgatacactttcgagcaagaagtatcctattggcgctggcgtcaagtctaatatccaggaggaaaatcgccgcatgggcgcgacgagtttagtgaatatgtggaaggagggtatggggatagatgttgagcttgagaatgaggggcaagattttggcgagaatggtcctgtggttgaacatctcggcggtggcattagggagcccggggagggattggaggacgagaagcaaagctcggtagtctgagtcgaggaccaggtttggccttttcttgttgcttagatggtaactagagagggaagagactttcttttattctgggctgatccgcatcagcaagtccagccgaagacgcgctctccttttatgagcagttgcattgactctgggccgaaggcgcagattggattcccctcctggcagctccatagccgcgctttgcttcgaatgacttgcattcagaacctctgcttctcgagctcattcctcgagaaggaggaaggaagatgagaaggtagggcatcttgggatgttccaacattgccccccaagcagacatgatatttgtcgcgaaccagatgaccaaggcaccatttactacctaaataggtagtatatagctttctctccattcttcatcttcttctctctccttgtcccttttcttcccacgggattgattacactgtttctccaattgaccttcactgtaaatcaggaatattctgtatagtttaaactgagattacgtgaactaaataaagaacccagccttgatgtagtccacaaccttggtgatcttctcaatagggaaactcctcaagtggtactactgtggtagtacgacacggcggccgcgattgagctcgattttccgggaaggaggttcttgagaaacaagaaaggtcaaataattgtcaccagagtcctcatcgtcagaaggaatccccgggatatcaggtgcctggatgagagagacatattagatagtataccaagcatcgtatcatgtaacatactccaggatactcccagtcaatgtcaaccccgtcaaggtagttttccttgacgaaattagcaattttggtggccattgtcagtcggttggcggctttgactccctgacggaaaatattgtaagtgccggacatagtagaaaaatcccagccgccaaagatagaatctttttggcccggagacgcgcaaaaaactcttgaactgatattcgatcagaacatctgagaatttgacttcgtaatctgccattaattcaccaaatgcaaagtgcagatgtgtttactctgacccgttaatctgtgaggcatcctggtacagacaatcacgactactcaagctataaccctcgaagtaggcaatgtttcgcacaacgtcaagggcagcaccgcggacagtctccgtaccacagttagaaatgcaaccattcgtgcccttctccgcggatcctggagctccagtgtgccacactattctttctgttaggacgattgcataatctgtttcttgaggaaagaacttacttgaccccaaacattgcagcacgcattcagggggcaggtattgagatcggcaagatctgttgtgtcgtctggcctcttagtactcggcttttgggggccgcacacagcgttagccatgggggcgggcataggcggattcccgctactcaggcaaataatgctatcgacccagacatgaacagccatttcagcctcatgtcttcttgtttaaatcttccagatccttattctcagactatactcggcagcaaggtctgcacaactgtcatcttgttgaatagtgtaggtagcacacgatccgtccgggttaggctttggggtaaaatcagggagtgttccggatgagcaacagacatactgccctggtttgagggttgaacagaagttggttccggagttgtacttggttaagtccgcagcggagattccacactttgtggccagagcagcgcagcggagccgagtgagacaaagggacaagatgccaagagttagcgcggaaacgagcataaacgagggcttggctgcgtctacaatgcaacagtccctggaaggaaggccactaccagtccatctatctcgtaatagtccgattcaggggctcagacaacaaaacaactcattttcgccgtttccatattctggccctctatcaacttgttccctccttcattactagcgaaagtagtgagatcctcatgtactataatgtatatctttccgaattgcctttttctggccctatcgcaaattctcgcgtgcagttgggcgattaacacgcgagggatcatggaagtagatttgattcttccgcgcaatgttacctatccccctcgcttatgctgccgatcatattcgccatccaaaatccgagcctcctcaaaagcttcggtccgatacttgaatagagtattgagcaggagaactttagtactagcgatggaagtattgctaatagaatcaatgccggcggttctattcgactgtggaacttcaatgattccagcagcaaccctcacttcctctattggagtcacgcgcggttcgatgttgaaggaaccttcgcattttaatgggggatccagatagatggatgctctcgagatccggagacagacgacgtgagcttgggaagatatggtaaacgcccccatttctacttctccaccaagtttggcacttcaccgccggattttgtcgctgtgaaagacgatgatacttgcgaccaatcgttagctcaggctttcaatttctccgatcttttggagctcccgccaacaaacacagttccctacggaccctcctgtctagcccaaccgcctaggctgcctagggttaccaatccttgcaatgtcagaatggactcaccagccgcagcaagtatctcggcggctttaacctctactgcgtgtgccgtggctcgaacaggggtaatctgcccaactccatctcctaaaaatgcagcctctaaggcacaattaccgattggcggggcatgggctttggtaatgagtacaatactcatttagggtctcgcatgattcatgttgactattccccaagagacttgttttttgttcttacagggacagttcgctcaattgcacgctagttgttgacactctcggaaccaagcaggtccgtccgccaccgcaatgcctgatatgatataggtccgagtccatcatatcagtatgcagtagtcaaccaaaaagtgggacaccctaggacaaaagaagtaaatgttatcttatagccagtctgatcaaacgttacatccacgattaaacaagcacgtgaaggcaccggtatattaaagcagtccaggaacggcatatttaagagaagcaccatcaacatcccagtttgttttctctctattcaaatccatgggttacaaggccgccatgatctctgccaccgttgtctgtaacttctccagcgtacctaacaaaggcgatacttgctcgtccttcgcttcatcctggggtcagactcttgcaaatttccaagctctgaacattagcatctcttgctcgactctcacagccggccaaagctgctgtgttgttggcacagtcaaagacgagccagcgaccacgacgtccacgataaccacgacggccttgacaaccacaacttccacctcccagtatgatccaacccagtctggcattcctcctagctgtgatggcttccatctcatcgcatccggtgaccaatgcgatacgattgaggccaagtacggcatcactgaggcccaatttaaggcctggaaccccagcattgatagctgtatgcccaccacttttatatcatttcctcttctgtatattgtcattcactgacgcttttttactagcatgctctaacctctggttggactactacgtctgcgtgcaaatcccgggcgctacaacaaccacctcgactccccaaccgacgtctacggggccttggccgcagatgcctggcgtcgcgagcaactgcaaacccttttacaaggtcaagactgacgataactgttaatcgatcaacacgactgcggccatcacactcgcccagttccgctcctggaatagccagattgatgccagctctatgtctgcattggactgtagttcaccagtcaccttttgtactgagatcctactatcctatgagacgtttccatcatttaaaaggccaaaggaagggagtaggatatcgtactcgcagagtgcctaagctgcgaaattaaaggaatacaaacagtgataagttagaacatcaaaaacacaaagcaccagactcgacagttgtgtctgcctacatctctcttaccgcctcctaatttgtataccccgcttttgggttgaactgctatttgtacttcgtatgtaaactcctaacaaaataagtcactcctgtcctatcttgtatcaactgcttcttcatccattaaggagttggatctatagaaatcagctcgaatataccttttctgatgaaaactaacaatgcatatattgttatatgtaaaccagaagtgcaaaattctgagtggtacccaatcaagaaggcggtactggaaattcaggcaggcgagcaacaatgccctaactatgttatatatatatttagtctctagtaaccattctatacgggctcaatgtacctttcactagtaatgagtgggtttactaggtcaccaggtcaaggtgatgtgattcccgcaaaaggggagagtggcagtgctaggtcttggcacaatgcttggcgacactaaaaataagtttccacagcagcgccaagaaccaattgggcgctcgtgacactccgcgccagcggaaacgacttggcatattgctccctagctggggagaacagaaacccagagagccttttcaacatcaatatgtcgagagactcttatgttctgtgatttaaagtatgcgttagaagatatttgagtacagagtgctttccctaaccgcctaagcccgggtacaccgggtaaggggggatcttggcattactacactctcatttcccaaaggacaactcgacgccaagcgcctgagaactgggcagtgctgagcagagctgcacccataacaaagtcaggcagcaggattggttgtgccaatgtcttggaattatcactctgtacataatcccgctggtacggcgcctctctgccaagtgactggtttcatcgtgatgggttccattgtctttttgctttgtcgttataggggatgcacactcatatttgcctcctaatcccaatgcacttaacctctgctctccatctcctagtcccatgcatttcctccgatgtcggttaccgctcagctcgcgtcaaatgaggcctgtgatcctttctaggtggttgaccacccttttggcctgccttctcatacaaaatgtcatcgcaattgacgttaaccctgaggatgagagtgtgttcattttgtaccctggctaggcatttcaaatgactgacatatacctctcctgacagcttccctcaaagatgccgccaagaccgttgccaccaccatgatggatttctacaatgaccgcgactcgaaagatattccagggaaattggacggtacctggtgggagggtggttcaatgtttatgaccctcatccagtactggtatctaacaggcgatacccagttcaacgacgccatccaggaaggcatgtattggcaaaaaggcaaaaacgacttttttccaagcaactactcccaatatctgggtaacgacgatcaagtgttctggggattggcggcgattaccgccggggaattaaacttcccagaaagagacggtgaagcctcctggatatctctggcggagggtgtctttaatggacagattcctcgctgggatatgactagttgcggtgggggtttgcgatggcagatctggccttaccaggatgggtataatatgaaaaatgccatatctaacggcggattgttccagctgtcagcgcgcctggcactatataccaagaactcgacctatgccgaatgggccgagaagatttgggactggagcgcgtctacaccgctgttgaggaagacctgggttatcgccgataccactactaacgccgcgagttgcaaggatcacggtgatcatcaatggacttacaactacgctacgtatatcgccggtgcgggctatatgcacaattacgcatgtctatcccctgtccctgacaagtcgagaatctcaattaacaggttttatagaccaatggcgccgaaagcaaatggctcgaaggcgtaacaggactgatgaagacatctgatcagtttttccccgcctccggtgcgaagcaaataatatcggacatcacctgcgagccaatcaataagtgtgatcgcaatcagaagaccttcaaggcctacttcacttcctggctcggattcatgtcgttgatagtaccatccaatgtcacggcggagatgatggggaaattcaagagctccgctgtcgctgccggtcagcaatgctccggtggaagcgatgggaagcattgtggagttcgatggacgaagaagacggaatgggatggaacttcgggcttggagcagcagatgtctgttttgggtgttcttaatgctgtcatggttccattcaaggcccagggcccttacaatgctgacaatggtgggacatcccaaagtgacgcacttgggggtaccaacaccgagagtaacttggagcctgaccctatcaccacaggtgatagggttggcgcgggaatcttgactgcgatcttcgttatactttgggtcgggacgatatcttggatgatttttggagacaagtagatacactcaactgtgaaggcgttcaatacatgtacatatattgggattttgataccttgagggattcaggctttatgataatttctgattctagcagcacatccactacaacagaaaaactatttaccacattcagggaacagcatcatctaaagtcgcgtcgtcaaaaatttgtgggtcaaatagagctttctacaagctctctgaaatcgtactgccgacttagtttcttcttacaatcattttgcggttctacctagagaaagattataaagagcgacttgctatggatggtgagagagctgagggagatcctggatatacagaagggcaagtatgccttgaatgcttagacaaccacaccaagatctttcccccatcctgtacagtgcagattttcttgttctcctcttaggcctcctaatcctctaggttctcgggcttcttatcacccttctgagccttgtcgtccttctgggccgcctctctagctctcacaagtttagcgacatactccttagtacgtagcaggcgcagtgtagctgcattagtagagatgccatagtgtcggctaacagcgcccatgtcgatctagaatatgatattacattagtgctgaaacataactgatgaatgagagatgaagtcaccttcattcctgtcgctttgatacatgtaagtacgaactcaagcctgtcttctagtatctcacgactaggttctgaggcgagcttggcaggcctcgagataggcttagcaatagcattcttgttagccttggccttgataactctgttggaagccatggtgaagatgatgctgatatgagcttgtttgatgtaaatgtaaatgcgaaaaatattgtcttagattacgggacctagggagcggagagaagaaggaaggaaagcaacgtgaattaagatcgtgaatccaatatatatcctgacctaatagcaaacaactttagcgtcttcttcgcatttcggacaatattgtgcgagacatgacctcagcactcagttgatagcgtaactacggcggaaagagataaaacacaaccaaaaggaataaccgattcatttatataatagaagagaactttgtgtatcatgaggctcatgtaagcttcgcagattgatttccgtgggataattagcagagcaatgtccctgaaagtttatatagcatccatagatggattgtgtaggtcaacacagtggcatgtccttctagataccctcactgatgttcacactctactgcctttacattcccacgaagcacttcatacttggcagaatcagaacagtatcgcccacattaagactaggcctggccatacctataggatacattatttcctactttttagcaacatcaatgcacaactttgttgctaactagctaggtaagttacgaatggaagtccggcgatggctagcctcagaagcagtcattccaaagttaactccataggtccttgcattctacgtgcacaaattaatcagcttacgcttgattatagaacgaaagacgccagagctattagtcaaacagacaagagtataaaaaagacattaaggtattaccctcattcccctaaactcggacaaacgctataaggtgaagtatcatattagcgccatgttcaaaatcatgtgtatactgcaagagagtcggagaggaaacgcttactagcatcaatctgctggatgttcggcaacgccaagcgcaccttattccgataaacagccggcccattcaattgcaacgggttaccctcgaagtaaacagtttgcagcttctccttatccttcagctcgcgctcaacttcctggaagctagcaagctgattattcgacccccacagctcctcgaggttctttagtgatgaaagatgttcaagatgggagacctggttgttggaaaagtcgagtacgcggagtgtctcgttggattccagccctgaaaggtcggttactgcattgtgagagaggtagagctcttcaagctttgggagcgcggaaagacccgtgattttggtgaggcggttcgattggatggagatgatgcgaaggtttgagaggctgtccaggttctgcaaggctgtcagcttcttagtttgttaaggtatattaggtgacaactgcggaccttcatttcgacgatcttgtttttcccaagccagagttcttccaacgcggtcagtgtttccaggttttcgatttcctgaaaggactcgtgtcagcatttccattgttcacctcgtacccagtatcatataatacgaacccgaatcttattcgcgcccaattccaagttcttgatttcggtcaattcctccaagccctcgatacgggagattttattctgcacaaagaaaatctcggtcaacttcttcagatgcgagacattcttgatatgcttgatcttgttgaagctcagatccaagcttgtcaagttatggaactcctccaggccgttgatgtgggagatgaggttatcgtagaggtcaagttcggtcagactggcggcgacattaggaggaaagttgatgcgtgatatttgattctggcgcatgcatagtctctgtatatcctagcgcattagccatctggataaaccaaagaaatgcctcgccgttgcacttttgtccttcgaggaaaaagtggtaccatgcccctctccgctaccaggcacatgcggattccagggccgttgggagtatgtacctgaagtttagggaagcgttctaatttaagagcagagattgacgatatccggcaatgcacgaggtcgatatcctgcagcagaagaacgattagcaataatgtcgcgcgcgcgtcgatcagcagagtccagggctatcagcctacctctgcattgacatcttcctctgccaatagatctgaatgtccattagtctattgaatcgccaatgaccgcgccttaagcaatcaatcatccagcgaccataccttcatcagcctcaatctcatcgaccgggggtgcatccggatccgagtaatctgagtcctccagcgcctccgggtttgtaataaccgcctttctctccattcgcatttttccgtcccagccctccttgttcttcatgatttcagcctgcgtgagttgtgggatgtttggtggtggttggaatcgcgattgcggggagcttttggcgtttttatcgggagacgatcgccaacgggggattccgaaacaagggaatccaaggatatggagttgaaagaacaaagaagtaataaagagttaagagaagaggttgcactgcgagtcaggaactgaaaccttggtttcgggaaggttgagctcaactggtgactacatcatcgtcttaatgcggatgcggaatggctccgagacacttgaacctatctacttccgtgtctgggttcttaatatcatagataagaaggtagtaattaatggattaaattcatctctactctaatagaacttgctccattttgttttctggatacgtcgtctcgggggctatatacagcatcgagagccgtgattgatcaagtacattgcatgaatgaatcactccgacaactttggcagcgtaaagagaattattaggcactgctcactatgaaggaaatgcataccactgccaggcagaggtcccagcaaaggagaggacacaatgaaatgcacgctcgtgtattggtgagctgagatcaacacaggtaaggccgtgtaccagggcagaaatgggaaaataaaagcatatgggggatacagcggggacatgataaccaagagacgcctgcagaatgcataagaagcggacttgttgggtgttgggatgggggagaatacacaaaaaaaggaagatcaggacatgagggggtgttggtaaagcacagggaagaaaaagaaacagcaaaagaaaaaaggggaatgagctcctcggagcgagtgagatacaaaatcaaattgcaatgcaaaaggtcgaggatggtcaggttaatgtgctatccaagaacgacaacaaatgcaggagacggggccttggcccagtaggataccagttccatctgggtccatgctctgtcgtcgagaaggggaatcggatttgaagtaggaaatagggcgactacccatcaatggcagcaatgctggaggaacgcaaaaggaaagggcttttctcgcgtagaaaagaaagtggaaaagaaaacaattcgctcaaaatggatatctcaggcgtaagaaggatcccattgaggcgactacagggtgcagtccaggaccatgctgacatcttggaccaggggccctgcgagatcctcgaggacagggatgagatcgagcaactcattgtcatgagcgtcagagaaccagctactgatgggaatcgcatgctcggggtggaagatgtaggatgtgggggaattatcaatgatgattgtgtccttcaagtctcgaccgacttgtgaaagatcctggataatggttaggtttttctcaatcactgaagaggactaaggagctcaccttgacgtagttcccctggtggttataacaactctctcggaataagcggtgatgaaccacgttgtgaatatcaagttgatcaagcaaagggtcgccatactattactcgagttagtgtgtgtcactcgccgaaaactatcaactaccaactgacctttgaaaccgaggcagtgaataccaccacttcgtaaagttcaccaacgcgcttcatgaatgcgtccacgccaggacgtttaatcacatagatgttgtgatattgaccttcgatctcaactggaatggtgaagtcggcacgctccaagacctgacaaatcaatgatgagcgaaatgatacagtaatacgattatacgcccttgggcgcatactgaaagcggagacttaccttgaagctgctgtgaaccagtgtttcatcgagatcaagtaccaagcactttcggccacttaagtgaggcaaaggcgcagggagcaaaggatgtgcttcgtcctcataattgcctcgagcagggggggccgggggtgcaggtggcagtggtggtggtggtggagggatcaccacggggagtttcatttcttgatgagatgtggcttcttcttgcccgtcagtgccaaaatctttagggatggttgacgttgatgcagaagggaggtcctcggtggttgaggttgattggccctccccattgtaagtgtttgcatctgctttcacttcaggtacagattccatcacgattttcgtttgatcgtgtggggtaacatccttggtctgatctttctggccagaaaattctggctgcgtggcatccacagaaggaccatcgccttgcacactagccatagcagggtggatattgcggtcttcttcgccaggttgatcggcgctgactgtggagtttgctttttcatctagatatggctcccttgattctacagtgcttgagtcaccagtaggaggctctaccttgtctggagtaggcaatctgttagaagcaggtggccgcatggttgttttctttgcaggcaaagcagtgtcatctgcatcaacatccgaagaggagcaacagcccaagaaagctagaaacttagatggacttttcttttgttgaggctttgagggattgtgaccgggcatagtcgtcgcctctttactctcctccgcattcactccgttctgagtctggcgcgaccgtcggctacttgcccggctgtggtcccgtttcgaccgtaggatgctcactttggaactcctccgagaaggctcatcttgcgctgcttcctcggtcttttccgactcctgttgtttgttggttctcgaggatcgtcgcgatgggatggggatcaacaaatggcgtttcttcggagcgttgacgccttcagcagcggtcggtgtgctctccgatggtgaagaggctgggtcggaaggtgcgacagaagttgcgtcctgggttgcggtcgcatcggtacctctaccctgttcgggctcaggacctacggaaggaacgacgttagcaattatatccttcttgggtacaataggtaaaaaggagcaagcgcattcacttactggatgagcccggaaggccggaggtgttcataagtgctttgtctgcggattccagagctgaatctcgcgctgtgccctctccactcatcgagggtggctgtggtgtcaggtgtcccgacacggataaatataaaaaaagagagtgaagcgaaacagttcccaggtctgaaaggccgattcaatgccagaactctctaaagtcgagagcgcggctaataggggacgttaacacgcctcctagataataagcaagcgctctgggaagttcgcacgtaccgcctttggccccgggagtgatccaacacccactattgcactttcgaaaacaacaagctaaacgaacagaaaagggatgtgatatctctatcgtttaaaggaggattttcggggggagaggagtgaagaggagtcgggggatgtcacgtgaacgtacggtgtgggaaaacgggggggcagaggaggaaatgagatttatttcctttcttccttttttttacgctaaaaagggctaacaaggctagcaaggcacaggggccctttttcacacgctactacaagccctcggcggctacggtaaatgccgacttgctatcacagtgtgcagagtcataccccgtaccgagtacttggccgattctactttcaccatctatatgggattcttcaagttcttcttcactctagacatcatgcaacaagacatcatgcaacacaggacccgagtccaaacaagcagaatccttttaagatgatcccggtcagggcgcctgtggggggatctaattgtggatattaactgtgattgttatgtacggccccttttttatgaccactcatatggccagtaggaggagctatggccttcaaaacgtgattaatttcatttgatgtgacccaaattagatccagtccaaacaccaagtcgtaaactgcaaactaggttgtacctagctgttgatgttagtccgagttctcgaggttcactctctagttaggttaggtttcatatcgaggaagatgaacaaagccatgacacaggatatcaaagaaaatcatacggactatgctgtagagacaagagatgacaagggtggaaatatcgccacttctattattatcaaggttggcttcccaaatttctggagttcattggcaggtcgctggatgaaggctgggctgcagaaagagtacagtcagcttccccacgtgagttgcttctccgcatatccgaggttcacatgcaatgatgcaacaaaagccccaggatatcctcaactttactttcttgtcttcaaatgcattctctatggtttggaatacatttaaattaacttcatggccttcggtcgagtctagagaccgcccctcagttaatccgtgagtcggaggtctcaagccatttggagatggccgtccagtcaacccttcggcgtccggaggatcccctcctgacattatatcgccattactccgatctcatacgctccaagttccaccgcacatccaaaaccacccgcttgattgcaacgatagcccttcttttctccatcatcggctcgggttatggaggctatacgtggttccgagcgagagccaaggagcgggcccagggtagccgtctattacgccgaaactctggtatccggggcaaggatggatctcgaactatatacgtgccatacaaggactccctgacttccaaggtcttgatccatcccaccaaaccgactacttttgacgctcatcgacgactattcctcaaccccccggcatcgagtcgcagcaaagatgatggctcagcaagccagatccctccccctacaaccaaaccaggtctgaatttggcattcttgcatcaattcttgagtttgggtagtatcatggtccccagatgggggagcaaagagactgggttgctgatgagccacggcctttttctcttgatgagaacatatctttcactgttgattgcacggcttgacggtgagattgtaagagatttggtcgctgggaaaggaagggctttcctttggggtatcttcaagtggtgtggaattggaacccttgcttcatataccaatgcgatgatcaaattccttcaatccaaggtgtccatcgccttccgcactcgattgacccgatatatccacgacctatacctaactgacaataacaattactataaattgatgaacttggacggcggaatcggtcaagggcccgatcaatttatcacgcaggatcttaccctgttctgctcggctgccgcatcactatactcctcaatgggaaagccgttagtggatcttttcgtattcaactaccaactttaccgatccctcggcccccttgccctcagcggcattttggctgggtactttagcacagccgtggtgctccggaaactgtcaccaccatttggaaagcttaaggcagtggagggcaagaaagagggggatttccgtggcctgcactctcgacttttagccaatgccgaagagatctcgttctacggcggagccgataccgagcgggtgttcctagtccgaagcttcaaggagctgcagcgatggatggagggcatttatagtctcaagatccgctacaacatgctcgaggacatgatcctgaagtactcctggtcggcgtttggttatctgataacttctttacccatcttcctccccgcctggggtggctcgggtggtgcaatggagttggccgatgtatccgagggtatgggtcgcgagcgtggccgcatgaaggaattcatcactaacaaacgtctcatgctttcgctcgccgatgctggaggccgcatgatgtacagcattaaggacatatccgaactcgctggctacacctcccgcgtctacggcctcattgccaccttgcaccgtgtccacgccgatgcgtattacaccccacggggctcgcatcccgagctatattcccttgcggatgtccaaggcaccacccacaacggcttcaacggggtccgtctagagcaggtcccgatcgttgcaccatccctttacccaatgggcggcgacgagctcatcgagtcgctctcatttatcgtccattcgggcgaccacctccttatttcaggtccaaatggcgtaggcaagtctgcaatcccgcgtattgtggccgggctctggcctgtataccgcggactggttagtcgccctcggggcttcggcctcgacggaatcatgttcctcccccagcggccatatctcagcgtcggcactctgcgcgatcaagtgatctacccgcacacggagcttgatatgcgcgaagctggcgagacagacgcagctctacagaagattctcgacgacgcccatcttggctacctgccacagcgtgaaggtggctgggacgctcgcaaggagtggaaagatgttctaagtggtggtgaaaagcagcgcatgggcatggcgcggctcttctaccatgagccgcggtatgcattcatggacgaaggcacttcggctgtttcctcggatgtcgagggattgctgtacgacaacgccaaggagcgaggtatcactctcatcaccatttcgacgcgggcgtctttaaaaaagtaccatacttataacctgactcttggtctgggtgccgaaggcgaggcctgggagttcgagagaatcggtactgagaaggagaagcttggtgttgagaaagaactacaagagctgcggatgcgtctggataaggtggacgagtggaagcagcgccgcgaggaaattgatcaggagcttcagaaggtgtgggctaatggtagtgaagttgcaccgccgccttatcaggaggcagagcactctagctctgaggctctaactggggtaacagcgaattaaatgtacacagttattggcaatcttgaaggcttctcatggttgaaatccatctcctatgcacagtagggatatttctcagttgagtgttatatcgggcgctcatgtggcctctgtcattgatgacgtagtactttaataacccgacatatttaccctagtggctcaagataatattagggacgttatatgtaagaacacttcagtgtctttttgtactccgtatgttctttctagatgtataaggatgattcgaattaaagcggcaagaaatatttacctcttaattcaccgccttattaaagcggcggtatatcttatcgataagcccatcacagagaaaaccatagttcatcctcacttgctttcttgtacagagcctctgctcactgtctgcggccggatccttgagctgtattgctgttctatctgatttatttcggtgttgctgagcccaagcccccttacaatccaatctgcactccttgaggcagggaagacaaccatgtcttacagcagcgaggatgaggactccaatgttaatattatccccatggagaattttcccagcgatggagacatgagtacatggccctcaagtcactacattgaacgctccgacttgcgctggcggcagttacttgctgaaaactggctcaaagatatgggcacttatgaagatggtgagttgattgcagatgcttcagattcacgttttgtttggcatactggctttgtcgcactgtatttttttccgcattgcatttgttgggtgactgcatctgtcgtctcatgctcattcgttcattcgctccttcgtgctttgtgctggcctgttatggcctctcttttctgtttgtatactttatacctctactctcagactaacagagcatatattaggtgtcattcataccattgagaagttgcctgatggatactgtctatttgagcgacctcgtgggactaatcctagcatggtgggcctttctggtgttcccatcttgatttgcagctaacaatcatatatgaagtttgattcttttctttttggtcatccaagcggtcggtattttcaatcacagttatctttcttgccacatttcctctctctggtcaagaacgagcttgacaagtgccaatgcaagccctgtggtaaaatgaagatgagcgaagggactgcagtgcaagggaaggcgggacagaggactagacgcgttgtacaaccaagtgagtactaccatgcctcttacgttagatcgtttattgatacctattgagtcattgatgagcgccgacccaccgatgcagagggaccagattactggcgaatcttgattatgaaattgaaagataagggggccctcgacgaagatattgagcagcggttcaattttgactgggtattgactcacgaatggctttctgattactttatgaaactggttctggatcccgcttacatcccccgtcgtggtgagcttgttctctggatctggcagggtctcgaagacggctgcttgatgcgcaaccctgagactggcttcattgagatatttggcaacgataataagtggcatggtgtgcccaattggcgtgccggcgtggtgacccaaatcccagaggacgaagggcatatggtaaatatcattgaaggctccgataatccacgcgggctgagctactctggattccgtttggagactctgccagatccggtgggtagtgataagtcttactcggtgcaatatgcctatgttccgttgcgtaacatcaagccttttaacacatggcaactctacctcaatggccaagagcgaggggatattcacccatctattgagaatgccatgactgttatgtcttcgtggagcatggttcacaaattccatgttattggcacatggcccagcgccaggatctactgcaagggaatcttcgtcggggccgaactccttgccttacacgacaccgtccgtctgaggccacatggattccatcacgaccagctcaagtacggaacagtcggcgaagtgacagacgtgatggttattgaaaaaatcgcgctctatctttcagagtgcatcgacgacaacgaggagcagctagccaaacacttcacagccctgatatccggtaaggtgttcaccactgatcctagtcgcgttacccaagaaggcccattccaaggcagaaacccagtgtcatccggcggatcagcaactggtcctatcccactcactacggaagaagcaatcgctaccttccgccaggtcggcatgggcgactacggtccctggtaccgtatggccgatggtagaacctgcaacgtctccccacaccttatcgtgggtcgctgctacgaaccgctcgcggcagagcttatgttcggcacccatacaatgagttacgatctatccggcgttatggaaggtcgtcagtactcgtcacaagtcgattcgcgtatgcccgaaggcaagacgtggttctggggggattgccgggtggagacgctcggactgacagaaatcaacggtgtggaatgcgggcttacagcggcgcagcgcgaaaacccgcgcaagtggcaggcaatcatcaaaatatcacacggtgaagtcggtcacgatctccggggccaggccgagcttccttcttctgtcggccgaccctccaagtcttcttcgtccgctccgaagggtaccagctctcggccgagaactggtcttgagcatattgcgcagacgagtaaactggtcagttctgttatcggcagtgtacccgatactgaagaggactcttttgatgatcaagtgtatggtggtatctctgagctagggattggggttggtcattcttcgggggaggatagtgattattcgaatgagtaggttgattcgatccgatgtgcccgttgttttccctccttttagcggcatattcaagatacccatgggcgttacggagggataattctatcttgaccagatgaaattatgtgcagactgtacaatgttcaaatagtagtgtatcttattatcccacagctatgtaatcctgcagaacaaacagagtcaacatctagaagaataagcgtaaactacgaagaatattattgcaaccaatatcttagaagagaaatagattccatggctattgctttcatgtctatgtctaaaaactgacactcatataagaccaaatacgccttaaacctcactctgtccagcagaattccgcctagcgatacgtttcttctcagaccaggggaagtgaataacaggaggcagaatgaagctgttactgttatcagcaataccagcaaaggcattataccaagctaagaaagcaccaagcagagcaaagagcccacccgcctttatcaatttctcatttggcgcaccatccacattgaaaaggtacccgagggagagcaagagaatggcgatgtcgacgaagaaaaagagggagaagaatgccaaggtggatttgagagtgagcatagtgatcattgttgtgaagatgaaccagccctattgagagtaagttagttccaatctccttcttcttgcccggaataacatacgaagagatacaatgcaaacgaattgtaaaacatagcgggagacccattatccgcttcttcaagggcccctatgatatcaaatccaccggggataaaagtaatagcaagcgacatccagaaagcaccgtaagatgagagcacagtggcaccaaaggtattgccaatcgccatttccctggttttgttagctaaagcccgagtattcatgtccataacatgtctgaaacataccacatgccagccaaaagctgcacaaagccgccataaatcaatgcaggcccaacgatgatattaggcgcagtaatgcccctgacgttcatattgagacatcccagcacaaaggtggtgagtgcgaatgcgcacaggcctagtggtgccggattggcgagcttgcggtctttggggatgcggtatagacctggctggagatcacctccgaaggcagggtaacggctcgaggctgtgttgacgtgggctagggggccaaagtggcctgtttcatagtcgtcattgctggaggaatagttgtttgtatctttggcactgatatcttcttcgtgggacattataggttgggggcgtgaggtagacatagatgtacagaagagggaaagggggtatatagttcgagaggagggaatatatcccggatggcaatgcaattattctggacaaggttgacaagtttgacaagaacaattgcgagttcgttctgctttatatattgcgtagacaagtcgtggacaccatgacaccaccacgccccctcaacacatcatgatcaggaaacaaaattcctggggaagatcagcgccagtgcgggggcggggccagcccgaaaaagagtcttcggaagcgagaatagaggcgacaatagggggttctgctggcattgctagcattgctggcatcttggcataagagtaccccgtagtggagacaatatacagttccatccgtccgtagatgatcacattgcgagtacgagatcgtgatgtatcgagtaaagatcaacacgtaagactcgttctgagcctagaaattatggggaaatgcggagatctcctaggtggtagatcttggatctgtctataacagggttagcgagggtgactgtgtggggtttcggttccacctgtcggcatatttagcatctctagcactggattatagtgtaaatacttggcagaatgtggaaatctctgtcactgcctagattcatgtgccaagctggtcatcggggttcgaaacgcgtcactcacttttcctagatccatccgggctgaattcgccccccgggaaatccgcacgctctacggaaaaaaaggacaaaaactcaatggatgatttagattaacctcgttccaatcaaagcacaagctagaaacttaaaatccttaaactactcagtaattcttctgtacaacaccccttgcaaactccgcaaagctcaatccaggctgaacttcctctgcaaggttcggctgcgtgaatacagcaagagtattcctcgcaatcttctgcccaggactagccttagcccctttgacaaaatgcggcacggccataaacttgccgtgcgtgattagctgcaaggcctcaccagtctggaaagccagacaatccttcggaatgttgactttaacaatctcatcagtgcgggaacggatgtacagtccggccgaagggtcgggggaatggggaagttcagggagaggggcagatgcagaccctgacggatcgagacttggaggcgaagcggcttcatcgaggaacatggccgatgtcaagcccgtcaaacagccgtggtcaaggtgtgtagcgcaccagtcgtcatcactagtttcaacctcttcttcctgattagggaaataatgtaacagccgtgccttggttgtcaggctggttgtcacgacatggtgcagatacccaggcttgtagccttcgatgttggcttccgcataccggtcacatgccttggcgacgagtgccgcggtatcaatgatcagcccacatagtgactccacgctacccctgaattcgggtaatttggctggcgggggccagatgtttggcgcggtatactggggtagatctgggaaatcatctgccggggcgctgtctagagatgcatcctgatagaaggcacagttcacgtaatacgagccctttaatgtatcgaaatggcctgatttcagcgtttctttaccgcaagaccagccgaccaagtatttggactctgggctggtgagggtttctacatggaggttagtctgattttgcggttggagtcgggtggaggggcatcttacctagttcgggatcagggagagccgccaaatacgaggcattggagaggacctttgtgcgcaagtcgctgaaggtcgagggcaggtctttgaccacgatgatgcccaaagaggacggcccaaaggctttggtcagagtatcgaaggagacagttcctacaaaacttagcatctactcttcttcttctgttcttctgttcttctgaacacataacttaccatctacaagttcatgcagactgacggtgacggcctcggccgtgttggtctccatgatgttgtagaaattcaaatcaacttccccgctctcgtatctttctaatctcagagggcagctcttcgcctatctgccactaaatttcacacgatgttacttgatgcagggatataaataacacatccaataggagtcgagaattccatatcgtcccattcttggcatatcgtacagaccattactattacaaaagccctcactcgctacccgactgtccatgtcgtctagtcacagcccgtagattaccaaatggcaacacatcggtaattcgcttggcccccgtgaaaagcatacagagacgatcaaccccacaaccccatccaccggtaggaggcaaaccccactccagggcttcgaggtagctctcatctacctcgccaggttcatcagcagccttgctaaatcgtagctggtcctcgaatttgcggcgctgctcaaacggagagttctcctcctcgtatgtattcaccacttccttgccctcgataaagagttcaccgcgtgcggcgacgcgctgcttggtcgtcgggtgaacgaaggatttagagagtggggagaggcattcgggtgggttgatgatgaaggttgggttgatgcactgtgattcgacgtagatgctgcatagttcgtcaaggagtcgcgggagggttgggttcgttgggagtgggagggagagcttggtgaagatagcgtatactttgtctagggcgtcggggtattcaaggtcaggcagtttgtgaccagtgccctcttcgatgcctataaggaagtcgatacggcggaatggtgccgtgaagtcggctgtggtggggttaagagtgcctgttgtgtttaaggcgcggatgtgggctgccattccggagaggaggtcttcggtcatggccattagattctcgagattggcgtatgcatggtagaattcacaggtggtgaattctgcgttgtgtgttttgtccaatcctatatctcatcagctttgttagacaggcatttggatatctgtttcaacacaccctcattgcggaacgaaggtccaatttcgaagatcttgtcaaacccaccaaccaccaaccgcttgagccatagctccggtgcgattctcagcgacagctggcggtctgggaactcggtggcagaggtatagaacggacgagcaattgcgccgcctgccacagacccgatgatcggggtactaacctccataaaggatcggtcgataaagaactggcgtagatactgtaccagggccgcgcgggctcggatgatatcggctgtcgcggggttggctaggaactggacatggcgagggtagggagaggtctcgtgctcaatgtcgtgaatggggacatcatgcagacacggcgagagcagttgcggcaactcgctcacatcgatggtgagctcgcctcgtccagtgcggtgcggtctaccggttacagctagaatggcatttagcgacactcgagtcaggccggacggagacgagacatacagaaagcgtcgccgcgacgcagaagacgatagaacttcttgaagtcctcgggagagacattctccagacgacgcttgttgcacatcacctggactttatggccgtcctgcacgatatcgaagaagatcaatttgcttccggcgagtctataggtacggattcttcctactattctaagtacatgggcattgtaaaggccagaaagcagaacctaccagagacgatgactgtgtcttctactgaatcattgtcggcgagctcggcgtagcgagagcgaaattcggcgcagctcagtgtgcgtgtgtccaccgctaggcgagggtatgggtctgcgcaggcatctttgatctgctgtacgcgatcctgtaaagccttctttcctggtaatactgcagagctatgctttcgaattggctgtgtggttagtcgtgatgtaaagaaagtctgaatgcgggattgtctagcgagtcgcagtcctgcactaaagatttgggttagcaatgttcgagaaaattgacattgttgatccaaattaaagcattaagctttgtcagataaaatccagtacgttcagtgtccaaaaggacatcactgtagcggttctaatgcggggataaatcatcatataaggggcgagtgggaattgagggagtaaagcgataaacagtaaatgcaagtcttacctgtttcgtaggccaaagccagataaagcccatctagggcgaattgaaagcatagcaactgccaatggctctcacattgttaagagaagagaggaagaagaagaagaaacggcagaaccgagtttttccacgcgggtggcccaagcttctccgacctcccgtgctccgaatacgttggactttctggtgctctactccacatatctagcctcttaaccatctacattccaaatctactccaaacacatatacatcatgtctttcctcttcggcggtgcccccaagatgtcctcggcagagaagatcgctgccgccgagacagaagtcgagatgatctcagacatgttcaaccggtaagttgaagccctacagaatacccaagcgctatgactcgattcaaaaaccagaagactgcaaggaatttcattcaacccatcttcgaactatatatatgcataacccattctaacttgttaccgtcgcgatcatagcttgaccgagtcctgcaccaagaagtgcgtccccgccgattaccgcgaaggcgacctcaacaagggcgagtctgtctgcctcgaccgttgtgtgtccaagttcttcgatgtcaacatcaaggtcagcgagaagatgcagggcgaggccaacgccaacaagcagggtggcggcttcatgtaaacgtgttgacaacgagatttcttgggaaggagctctggtagacttgaagctagagagctcggtggtctttgtttctgtgtaaggctatttgactggttcggcctgctgaaaccgggcctgttttgaatgatggttcacgtttataccatcacggatggaaggtacgatcgccggtctatctctgaatatgtacaatatggtggatatgggaaaaacagagaatgaaaaaggaaaatatcatacaagtgtcgtcgttaggtcagaagcccatggatcgcgctatccatgcggtccaggaagtatcgtgctgttcctcgcctttgaccagggctttgattctcatctcgacatttacaatgtgacggtcaaagtcgctcaggccggcttccatgtcctcgaccttggactccagaacgtgtagttcgtagtccagtttggcacccagcaactcgacgcgtttcacgccatcggcgagatggtggctttcatctatgaggatgtcactagatcgttcgcgcaatctctggtagtcgccaaagcgttccaggtagactgagttgagctcctcatgtcggtcacataggagttggttgagaccttccacggagtccacttgtcgttcaacccaaggcacagtatgctggctcaactcttgaatccgtgagctgaaaatgcgtccctctgaggcaagcatgtcttcttgaacgatagcctcatccaggttattagtttctttgaccgttggtttcccacctaacggctcccatttgaataccacttcttcaactatgctgaacgacaggtgtcgtgcgcagaagttgtctcgccgttcaagctcactttcaagactttggaatgcttcgcaactttgcggccgccgcagggccatgacagctatcccgctaatcgagccgtcacggtcacgatccgttgacgctgccgtcgaccgagatataacgcgttccatatcggattcttcctcgattattggagcctgctgtacaatgggccagtcttgagcttgtgtttctggctcatcttctggcacaggttcgatatggatttcaggagcttttctctcagactcggaaaaaggggacagttgaggtttctcttcctcctcaatgagcttttcgatatcgtttgatatctttctttctgagcggaacccagagtcggttcgtgtttttgttgacggtgcctcgttatcactatcgatggacgggcggtatgcaagatcgtgtgtcacctcggagctgtctcgtgaagaatgatgctgatgatgatggcgctgccgtccgactgcatctttgaaacgtcctagccctgctcgcgcatctgaaactcgcccactgacgcccttctttcgatgatccttttcttcggcgggcggttctggcgtcttccaagagcgatctagcgcggagctcgctcgctcggcatgtaaatcctctgtcgaatgctttctgcgactggtccagacataaccaccttgttcatcggtagtaaacatcatatccgatccagttccccgggtgaacccgtcttcgacaccactcttgcgcggtttacccagccacagccacttggctctctcaccattgcagcactgaacaaaagtgtcaagatccagtgtttcgatatcggcaataccgcctttgtcgcgcccgcggaccatccccataaccatttcaccaccttgtccactcagctccgccatggttgacttcactgcatcggtccagccttctgcgttagcagccttggccgtgacacggtgtaaccggtccaatgtgagtcgatccagtcttcgagaccgcttcattttttgagacttttggaacccaccaattcctcttttcagactgtggaagtcgaatgcgtctttccccactggggcgccataggcgtgcagtctatttcgagccccaagcaacgtgcccagcaatgcagccacgctagtgggtcctaggctgctgtcgcttggctcaatgttgtacaggtctgttccgatatctgtccaccaatcgctaatagctgcctcagtcacatcacaaagtagcccgtccacatattccggggctagcttgtcaaacaccatcaaggcaatctggcattgtctgaccaattccatgaccgcattgtataaaggaaccctctcgcttgttcggtacaactgatgaaacttggcttcggtcgccgctgagggatgttgaagcttcaagcccgcgcggcctgcgcacccaagtctttttaagtcttcattcacaatgaaatcctcccggtgtttcttgatgtcgccgtttggtattggaataagactcaaggcagaaggaaatgaggccaaatcggtaaccatgaccgtccctagtggtgtttccttccttctggcgtggcattgcttcatggcgtcaaagtacatccgcaatcgaggcgaccatgtagtttcattggtcggaacactcagtactcccacaatcaccgtatgcgaagggtcaccggtataggtcgaaatgatgaatgtcggatgcacgcgagagcaggcccattgctcaacaatataaatttcatacccttgcagtgttacacgtcgctggagcacatcggtcgaagggtcttcttctaggtatcggagggcaaccgcatcagtgaacacaattcgctggtggccttgcggtgagggacgttcggctccagttgcgtgagaggcggcctccgatggcagagagtcggtacgatcgaccggagggacattcggagcgttgacctgcatgatggctggtctcctgttgggctcatatgctaaaggaacaagatgaaaatagcgccgaccattcaacccaaccttaaagtagatcacctctcctaagctcaagatacgaagggagtgccggccttccttcgatcctcctgcactcttggtcaggtcggaacagttgtgacatatccaggcaacagggtttgaggcatagcatgaacctgaaataaaaggagaaaggcaaatgtattacgggcgaacgccttgagaaccgcataaacccccgaggtgtgcagaagtggcgacgtcatttctgtacctgatggcggacggatcatgtgaccatggctgtctggtgttttagcctcaggcatctatgattgtacatctcccctctttaggatttaacagctttgaagagacctcgcgacaatggtcagcgctcccaagatgcaatatatctctgctaaatgctcaagagaaaaattacgaggctaattattctccaataagatctcttctacaatgaaatctctctccaatatatgacgtctgtcgggaaattacatgctaactcttatacagcaaagcgaatacggcatcaagaagaaagaggcaattctcgaaagtcatcaccaggatgctcgtccagcgaaatggcagacggatttacatttccgatagaactatgcatgttatgagcctatcaattcaaagcatgtgctcccaaagctctaggatatccacctccagtcacctctgtcctgctatttagcgtccacccggctgtataatagtcagcaaaagactcatgtgagtgaacgagctatacatactcctccatggggaccaccgggtccgccatgtccaccctggtgttgtccaggaccaccctgttgtccgaaacctccctgaccaccaggtccgccggggccaccctggtgttggccaccttgctgctgtccctggaatccaccctggggtcctccaaacccagggccaccagggccaccagggccaccctgctgctgtccttggaatccaccccgggggtctccgcccggaacgcccgcgcgcccaagactcatgtgagtgaacgagctatacatactcctccatggggaccaccgggtccgccatgtccaccctggtgttgtccaggaccaccctgttgtccgaaacctccctgaccaccaggtccgccggggccaccctggtgttggccaccttgctgctgtccctggaatccaccctggggtcctccaaacccagggccaccagggccaccagggccaccctgctgctgtccttggaatcccccctggggtcctccgccgggaccgccagggccaccatggggaccgccgggaccttgctggtcgccgtggtttccgtggttcccgtggttctcgtgctcgtgctcgtgcttgtcgtggtggctgaagagacccatggttgatgatggtatgatgaagtggggaggtggtagattgatgaacagtgagatcgagatgttatttgagtgtgagtataattctggaaggaaaaggatggaggggttacagctgccctttataaagactgagtggcgtcaccgatcagaatagagctaagacgctatgagctgaacctagtcttagacggggatgatggcatcacatcacgtacgacttgccgatgtggagtatcagaagcctatgattgggacgtgctgggtatctcctccacttggtaagagtatcgatcgatgaagacgtagccagaccctagatcgatttgccgttcttatttaatctattgatcgactccatcaatatatatctgagtatcggtagagttccagcttgcagctattcagtgtcaattccaatatgaacagccaactttgtaacataatattagcatttgcagattatctttgggggcctgtcgattgctgctcagtcttccgctgctgggcttggcgttgtcgatgcgtacgtacgcctctccacagctccagccctactccggactaaccatcttattgccaaaattctatcgcccaaacccaagagccgttctcggacttaattgccggtatttttttagcgtcggtcgtagtcatcataaacagtaagtgggtgtcaacctccggggccgtggaccaaccagcatgccagatgggcacagccactgtggcttgttcgtaccgccacattataggtccatcagctagccaccatcgggttaactagaccatctttgccatcatcggcgattagacagataaactacaatatagggttctgacagattataatttcaactacggagtaagtcctcgctatgtaagtaacccaacaccattcgggtgttatagcttaccacaccatgacggaaatagtggcaattgtaccttttgttaaagatttgcatacaaaaggcacatacggctcatcatcagtttctcgactctcgaaacagataggaaatttacagtcactatccgaggctttatattttctacaatgaacgatccataaagaggtatcgtatagctatagcgcgaactattgttgcaagttgttcgaaaacttcgcgccatagcatattggaccccctgcctacggtttaaataactagtgaagagggatatgtggatatgcacgatggacagtctggcctagcagacaagacgagagcgacatagcaataccaaccatccagggaggtcagctagcaagcatggggatcacacagaccgtagtagaaatctttatctcctaatacaacaacatcctgtaagctcctttttcattctgtaagtggtgactggtctagattctctcctctaggattctatgtagttgacatcaacgccccgatattctctccacgcctgaaaggtaaggccactacttgaggattccgctttccccaccagtaccgccttccttattaggtgcgaccttgtattctgccatataatctgccacaaaagacatgcattttgatcagaaaaaaaagtatattctacctgattcctctaaatttaaccccttaataataaagaagttgatatgacagcagttactttattttgatacaggattacatacaaattgcgactgtcttgctactacatatttgacgaaagtgatatataaaaatagaaggcggtgtgaagtgcgatagatagaagtgtggtacccgaatggggattggttgcttggcaaggaccgggtctcgagggaaatacattagcggatgttgttatattgggaagtcaagcaagtagactgtcacgtagttataaagaaaaaaaagaaattcttggtattcgtctcacgagcacagaaatatatatgtacattctaaaaaggtcgcgaatcgaatcaacgctataagttacaggcaagcgtctatacaataggacgtatccagccacgggctaaggcaaggccatgctcatctggactggttgatatccctttggattgtggagattcttgtgagcggatggcatcagatcgacaatcaaagagagaatataaccggtgaagacaaaggcgatgactatggagcggattagtataatatcaggcagtggacaggcgaaaatcatatgtatactcaccccattcaagagtagcagccatgttattctggttgtaatgggtatgctccgtgacccggaagacaataatgagggcaagttcaacgacaatgaacgaggatttgataagaaaacttgtcatgagcatgggctgccgcagggcatgtgcgatgcccagatagatataatccaagcacatcaaggccgcgctgacgagaaacccgacgctggagctgtcagtacattgtgacttaagaggtataccggatatatcgggtatagcggtcttggcgagggacatacataaagattgtcacgcagacatcgtgcatgaaatggtgggcgatgttgtcgaggacggatagcataatcaatccgatactcccgacaactgtgaaaaggaatgaaccgtgcgtgcacgctttgctgatgtatgacttgttttgaacatgttggtagaaagagaggtttagaagtaggactgttgtgatcgatccgatcatgaataagggttttaattcctgggctccaatatctgaaatgaatctgttcaaagatgttggttaaatcttggcatgattgaggatgaccaaagaaggcaagtgctcacggtatattctgaccaggcttcatcaagccatatctcggttcaccgatcatagtccagtggcctaacatagtgagtagcattgctaaatccaatgttagcatattgctcaatgcgatcgtggaaaattcaagacctcacctagccaagtggacgcggctacggccggaaagacccaggaagggaggaacattataatgtgtgcgtatagctaaagagtgtggtttggagcagcagtcatagtcttgttataacgacagtatcaaagagcacgggctggtgaagttggataccagccacatctctttactcaagtagttgacaaagagagaaagtgatccatccttaggttgggaatcaggcaacaaatattgtgcctgtcgatccctgcccctatgacgagggtcagttatggtatgtgggtctattaaggaattggcaaccccttgatcgttgtttcgtgtaagaagcacatgtttcgtacatgaaaggcacaagccgggttacagaattagcacaaagatggtgtatttatgtcgctttcatgaaacttgggaggtagataatgaatttggcatgctttgactgatatctatgcgtagaatgaaaaatcagattgcttgttgctccactgagctccataaaaaaaaagggaatcgagaacctggttacatatcctttagtaccattggtggggccggggctgggatatgtttgtcgacattgggaaagcaaagcatcatgtacatcgcaccgtttcgcacgtatcaaatgtggagatggaagtgatcgcctcgtggatgatcaaagcttgtattctcactgtacctgtcgcctgtagtgtatcagagttgcatcaaaggccaacgtatatcccttggcgaggatggaagggaccggggtctggaaggaaagtcctatgagcatttcacggatctcaaatcccggtgtaaagacgagagcaaccgagagcaaccgagaacaaccgccgctcccgtgactacggttgtacctgtaatatgatctcaggtaccgatttgggagagaaaccaataagcacggagtatctgtcttttgatactagacgtgtcaaaggggcatatgtgaggaagcagacaggttaagaggtgggacccaggatacacctacatgagttcgatgctcatgatgaggtatctggctggcacgttgttccgacgtttcaacctgttttaacagcacggcaacttcccggtcggacaaggggctggggtctgctttgttggccggtagggaatgcagtcagtagaggtacctagactgaaaggtggctgggagatgttctagtgatatgtcagtgactgtaattccacgacaggtccatggtttggctgtgttggagctccattgagatgaaacttattgatagcgtggtgttcggttcgaccagccggctgagtagacaccggcaccggcatggagtagccgaatgtgtacaggagtacggagtagagagtggatgaccgaggggtattacatcagtggggcagtgttgaccctacggcgacatttcaaccaaaaaccgataagaaacgcggatgaagatagtttatctagcagtgcaaggagtttcaaggagagaagtgatggcagcaaaaacaacttcaataaagactgcccaggtggctgccgtaaggggggaacagtgggccggctggcaagggcgaaatgtgatgcgacttacggacgcgtcagtcaggacgcgacttgttttgaaaattttcttttgaagtttatggattgtctaacaagatcatggaactatctaagcgttatctcttctctaagagccaccgacatgggtagcaagtagtgaaaagactcaagatactcgagggtgaccgaagtcgcccatcgaagaatcaaattcaaactcgaggactcaagagtcaaggagttgaggcagtaatgtttcaaaaattcccaagcgtgcggtaaagctcgcttgaagcagtcaatttggtagttttcaactagcaaaaacacgatctcggatgtctcctcactgatacgtgtaaaacccatgcactaggatgaagaagaaagaaaaaagaggaccaagtttgggggggagaccacctatttatattttcctattggctgaaggcagcagcaatgaaaaggtaggtgacgagctcggaataaaggatactccgaagcaaaatagccgtgtgcagccgtggatacccggaaatatcggagttaggcggagaaactatgaagccgaagctagatgtgatatatggacgaatacggaaggcggtatgtagtgccaaaataacgcccaggttacagggctacgaaagcctacgatgctgatgtagggtacagggaggcttacatggggttactcaccgggattcttggcctgaagctcaccaggcctaagtatataccaagctatggagtgtagattcgaagaagggctgattcttgtgaaatttggtgttaatgcgaggtggctgtgtaccggaagctggaaatgaataggataatttgtatgcatgtatgtagtgtatgacttttagcttcatggatggaatatgcgtgctcatgctgctcatctactatgtaccaggcctgggcaagattccctattgctccataatcacttgccattcaccttcggaggggttgaatcacgtggaagatcaccgggaacagcttgtctctcagttcgatttcgcccggttttctctgacggttgtctctatttcgctgcatcgttttggaacaaagatttatattgcctcaaaattttatatattgcatcccgcgccgagataaagagctcttatctgaagttctccacatggcgagactcggtaacctctccagtcacctccgagcatatcaaccgaaacccacctgcaatggaagtagtgcagaaagaacacagccgactcctcaagaggaccgagggctctcagggcatcaagaatgttcagtctgcaatcgattcacttcagtctgctcgcgatgccatagctgctggtcagtagtaaacgtgccccgccaggtttctcaactgacgacgtcgatttctccccaaatagatccatccactgcctctgccactctagccacccttcacaactcggttaaatcgtcctttgactctatcaatgccagcttgaaagagactcacagtggcctcaacaagtacaccaaatcgctagataaggtatccagaatactgatcgtccatgcgttgctaccaatctaacatctggaacagctgtttaaagatcgaccactgcctagcaccgacgacgatgacctctcttcacacgaaaccctgatcaaccgcgctatcgccatgcatctccttcgcgaaggtcagttcggcgtggccgccaccttcctctccgagattgccgaggagaagagaatgtatccagtctcccagaacgagcgtgtaccgaccaatacaactgcgagcctgctcgatattgacgaagtcccttcgaccgagatccggaaacaattcgcctcaatgtactatatcctacaacaactacaagagaacaggaacttactgcctgcgatcgaatggtcgagagaaaaccgcgaggcgctggaagcccgaggcagcaacctggaatttgaactctgtcgactgcaattcgtatggctgtaccatggcggagcgaacagccagggaaccgcaagcggatggctagcagcgctcgagtatgcacggcaggagttccatctcttcgtgcctcggtatttgagagaagttcagcagctagtgggcgcaatggcgtactcgtccaacctcagcgagtcgccatatgcagctctcttcaacaatactagctcggcctgggatgacgtagctcacttcttcaatcgtgagttctgttcattgctgggtctttcggcggattcaccgctgtatattgctgctacggcgggcgcgatcgctctgccgacgctattgaaactacagacgatcatgaagtcgaagcggacggagtggacttccgacaacgagcttccggtaaggaaaccgctactctgtgtacgaatcaacactaatatctgtattttcaggtcgaaatacctctccctccccaatatctcttccattctatctttgtctgtccggtttcaaaggagcaagcgaccgatgagaatcctcctatgatgatgccatgtggacatgtcattgcgcaggaatcgttgaaacgcctgggcaagggtaaccggtttaaatgcccgtattgtcctagcgaaagccaccccaaggatgccaagaaagtattcctgtagtgtaggtctttctctttctttctctttctttctctttctttccctgtcctcatatctctgggtatttttctttccatggcaaacgtcgatgagacacgtcttcagggagccgggtcttgccaggggcgttagcgtcggcgttcaggggcttatatgttgcggcattgcaatgcaggtccattcaaagctgtacgaagcactgcaatttaattcaaacctgacatcgagcataagcaagttcaaggtaaaataacaatctcaccatagctgtttcccaatggacgtatcaattacaacaaagaaaccatcagaatctgcgtcaataatccacaatccacaactatttcccaaataggaaataccaatttcctttgtctcgatggcggcatctgattggccaaatctaggcccgtgaccacgcgccgatttggcgacttaaaaaacccctttacgcggtcgaaactagctgtgacgcgtctttcgccgagccctacccctctacgctggctaatgagagctattcagtcgatcatctgtatgcaacccgtcccacgtcctgtaatatgctcagaatacaataatagatgtacgatgtgacttgtctccgtaacaaacgggagcttgtagtcctctctgtcttttataaatactgccacatctgcccctgaatccatccacagctgtctctatattatccccaatccagtctcctatcctatccagtccataatataatagcaatgttgtccaagagaacaccagagactccaattcctggccggtatcgcgcggcaaaagcttcagctttcacgctccagtcgcgccgggttcctcgcgacagaaccaaagatcgagtgcctaaggacaaagagcgagagaactctggctctggatctggttccggctcaattcggagtaagactcgacgacttgagcagcgtcgaagattcgacaaacccccagacgtaacgtaagtccatgcccatgtatctccatctccatctgcgtctacatttcatcatcaccatcatctgcaccaccaaatcattaatccaaccgctaacccgacccccagaacacccccaacaagtccaatagtaatgctccgcgtgggccccgaaaaccgcctcttcgccgcccacgaagccatcctctgcgcatcgcccttctttgccacgcactgtacagcccaaacaccggacccgaatgcgccacggcctagactccccctccaaccggcaagcaaacgcattgacctcccagacgagcaagccgaagttttctcctgcgtcctcgagtacctctacaagggcgactactacccgcggctgcgacacaacagccgaactcagacatgggagctggaggacgccgatgccggcgttggcgcaggcgccagtggagaattgggacaggcgacggcgacggtgtttcatcatcgagcgcagggggtgatattacgggatacggctatttagtaggttgaattttttttcttttacttattctcatctggctatgaatgtgtgtgtactaatgtatgtttcgacagctgcgcagcagagaaatacaaactcccccgtctccagcgtctcgcgctgcgtaaacagggcctgcacactgggatccagtgcagcacgatacttgcaagtgctcggttcgtgtacgaaaacacgccggatacggagtcgaagctgcgggcgcattaccttgcgctgattgtgcggtcgcggagcacttttatgcgcagtggaactatgcaggcggagatggagcgtggggggaaattgttttttgatctgtttgttgctttgtgtaatcatatggtgagtttacctttctttgcgcttggggatgaggtgctaatttggtctacgatataggatgaccctactggtcagtcggttgatagttcagctgttaccactcattgttagggatggtcatagttccggattaaggtgggttgttggctttttgactaatcgcgcggttttcgtcattttatatcgctgctggcagtgtttcatacccgtgtaccactatgtttcgatacctacagaatgaagagtgtgaatcaaggtgtaattctcgaaatgattgattcgtaaattcgtaaagataggatctaatatagtccagctagcccagttttgatatatctcgtgtaccaggccagcgtgaactggatgacactgattaagctggcgcttcgatccggccgatgaccaagtagttgctagtgtgcaatttgtatcacgtcaggccaaaattcttcggcagcggtgttagctcatgagcctgagtatcctggtatgtcgaataatatagctgcatgaatgtaagtcataggcggatgtgtgtatacctgaccattttgaaggtcctggcgaccaacgagggagttgtccatgagcattagacgaaatgaggttcaaacacgttgcagtgcattgccacccaaaagcgtaattagacacctgtgcccgggaaagcacctcccttgctcaagacgatgatgcctcgatcacgtgcgatgtatcctttcatgagtccctaaggaggcgacatgtcagtaaacacttacggattgattatacttgtcagcctaccttgtagatgagattggaaagcagacactccacctcatcaatatcgatgcgcgaccggccacttgtagaagtacccacacggagagctgcggcaaattcattcacatgcacacgagtacgccgaaccggagattgactctccttgggttcgtcgaaaccaccagcgaggaaaacttttcggaaaaggttgcgcaaggcaatatcacgtccacgttctaacggcaggtaaatacgtctcttgacaaactcttcctcgccgtcagacatagcctggtcgaatccaaccaagtcgccttttcggatacagttcgacagagaccggaaaagcttctcgagtcgtgggaatggcgcgagaagttccttggtggggagcgtgtgtgtggtcaccaggtgacagggaataaggtaggtaagaatcaatctgatagtggttagtgaaagcccatatatagctggagggctactgactctcgattcttggttgcgtctcgatgacacatcttccaagcccacgttagatgttcttcagcctataatgcaaataatcagtcctggtgatggtccacggacacagctcttgctaatacctctgggtaattctcatccaagaagtggatgactccaacgtaatattcgaaggtgacaatgtgagctttagggaatgcttcgggagggggaagatcagccgatgaggctttgatggcgcgaagcaagtttttggtaagaccgacggagttgatctaaaggagagagatgaacattttccgagcgacagtgaggttgacatttggtaccttgaaatacgtcttgaataggagattggtcatgttgtagataccccacttacgggactcttcagggggtgctctggatctgatcagcaatggaacaactcaaataatctaaccatatccttacctatcactcaggcacagagtgaacatccggttaatgacccgagcagcctcctccaagttcgcattcttctcaacatcagctgcgatgtcatcctggaacccaaatccagtggagccttgggatgctgcttcaagatcggcattgatcgcgaaagtacgcaagtacttcccgactgtgtacaagcatggcaatgtccaagccggaatgccggcagagcccgagtatccccggatgagggcattggcgacctttttccaggcattgaagactgtaacaacactagcacccggaaggtgatcttcacaccgaagtatttcgcctatagcttcccagtaaacagcaaagatgtcaacccaggcattttgttcggccttcggcaatttcagacttttcccatggaagagagcgtagctgagatccttggatatgtattcggcgttggagaactggtaaaaggagcgcagccgatcgcgatcttcggacggcgcgatcggggtgagcacagcagctaattccgggccggacccgttgaggtatgcgttcttgaatgcggtcgggagagaagtcatggtgaactaccctctggcgaaagagcgcgttgattaaattgattgtcaatttatgagttgaaaagaagcattcgaggtggggaaagggttgagatccgaactgaccaagacaagcaagagtccatacttttggagaaggcatgtggggaaggcgaggcaatgtggctggtgcaatgtggcggaagaggagtggcgcagtcagatggctaaatgggactagcgcagaacggaatgcctccactcgcttagggcaagggcggcaaccctaagcacaattggaacctcacaattctcattttccatcgacggcacactaacgactcatccaccacagcgacaatcacagtgagtacttgccgcttgattttatcggggatttatactaacattgaactcttccagatgggtgagtgatttctattcccttcccgatcccccaggtctttttttcgagacaacggtgtgcgcatattggttggacgaacttcgagacgcaaagaacacccacgatatcgcatgatgcaatcacaaaagaggaggacgcaatggcaaatcgatgtcgcttggaaatgtttatgaaggaacgcacaacgctgtcgatcagggctacgcatggttgaatctcgaagttttcaatatccacatatcacccttgctcttctcgaattttcgccaacctgcatcgcgcaccgtttcatctctcgaactggacatctgggcaattggaatatacactaggaactatggctgacggattcccagggcgtcttactgagtaccaggtcatcgggcgtcacctgcccaacgaggcgaaccccacgcccaagctgtaccgcatgcgcatctttgcgcccaacaccgttgtggccaagtcgcgtttctggtacttcatgtcccagctccgtaagctcaagaaggccaacggcgagatcgtttccctgaacgtggtatgttgggattgaatattcgaggatatggaatggtactcatcgtctcgtgtctagatcgacgagaagcgtcccctcaaggtcaagaacttcggtatctggatccgctacgactcgcgctccggtacccacaacatgtacaaggagttccgtgagatgagccgcaccgacgctgttgaggccctctaccaggacatggctgcccgtcaccgctctcgtttcggttccatccacgtatgttgcgctacccgaaccttccgacaatgaccatattctaatgattatttccctgcagatcctcaaggttgttgagatcgagaacaatgacagcatccgccgcccctacatcaagcagctcctccagaaggacctcaagttccctctgccccaccgcgccggtggcaaggtcggcaagaaggtcttcgcctactctcgcccctctacctttgcttaaatgtgatgtttcgggtgttgggtttggagtgtgtggatgaatgactgtttatggccatagcatgcatgaaagatggtcatgtggaaaccaccgccccgctcacgggcgagatggttggatgtctctagtcccccgtatggtggcatctttaggttattttgaaaaaatcatcgggtttcttgaattattcgagttctagtagcacaatgggcatacatggagagtgcttatttgatagatgccaagacatcatttcggatgtatcaacctgcaatgaaggccttctgattcctgtcaaagtctgtccattcacaaagtggccgtatggttgtactgttacacaaggtactcgttgcaaatcgcttactactggccatatatctcattgtaaactacattcatatagatccatgggggtcaatgctccatataaaatactaatcgatcctatcgccctctttacattgcagtttcggtcttgaagtaagggttgttttagccgcgcctgggaccggcttggatgccttgtatatcaggcacccacgtgctatcttcaactgccattttagttgcaagtctttgattggactggcaataaagactagctacttgaagtatcttatgactatcttcaagtttacttaaacagtctttacagaaccttggaaaacattggtatgtacaggtgtccaggaactattgcgtcattcgaaatcaggtcgggagggagctgtccgctttcgcatatgtaatccaatttcttcggggccttcccaagttcctcgtttccctcttaccccattccccaagtcattgcaatcatgtttgctcgtcaatctttccgttgtgtgcagcccttgaagcaggtaagttgaaaagggttctcaattgaatccccatactaaaaccgttcaatcagggtttccgcaaatactctgcggaggccgctcccaagaagtccaacttggcccccatctacgttggtgtgggcctcgccggtctcggtgctggtttgtaccgctacagcaccggcgcggtcgctgagcccaaggaccgccccaaggtcttcaacggcgaggactgggttgatctcaagttggctaatattgaaatcctgagccccaacgccaagcgtcttcgcttcgagtatgatgataaggaagctgtctctggccttcctgttgcttgtgagtagtctgactccgagcatggttaccaatcaatcactaacaggaatctagctgctctgttgactcgtttcaagcccgagggtgccgagaagaacattctccgtccttatacccccactagtgatgagggtaggaaatcataaaatgcgacttagttttcaaatgctaacacatagcagatatccccggttaccttgaacttgttgtcaagtcctaccccggcggccctatgtctgagcacatccattccatgaacgtcaaccagcgcctgtcgttcaagggtcctcttatcaagtatccctgggaggccaacaagcacgaccacatttgcctgatcgccggtggtactggtatcaccccgatgtaccagctcgctcgtgagatcttcaagaaccccgaggacaagaccaaggtcactttggtcttcggcaatgtcaccgaggaggatatcctcctgaagaaggagctgcatgatttggagaacacttacccccagcgcttccgtgccttctacgtcctggacaagccccctgcggagtggaccggtggcaagggtttcatcaccaaggagctgctgaagaccgttctgccggagcccaaggaggagaacatcaagattttcgtctgtggccctccccccatgtacaaggctatctccggtgctaaggtcagccccaaggaccagggtgagctcactggtatcttgaaggatctgggttacagcaaggaccaggtcttcaagttctagattattgtagagaatttagctagaatatgtcgctagttggctatgcgacaggatagccatgtatattggtgcatcttgttttcggcgtgttgccgtgtctctggctggcttcggacgtcatattatagaagaaatgcattttgcttccaaatagataatcatgtttatctggcgcttgtggttatctctgtcgcattaacaatgataagaactacataggtagatattaagagaggaaaaaagcatgtggaccataatgaagatgaagatgggaagggtggtggatatatatgtgtacaccaactggaaatacttttgcagaatacgatatcaacagaagatggcgccgaagtagtgttaatataggaatacagtaaaacaaaggaatctacacctagaattaattgaataactgcctacatacatatacatgtacacaaagtacctagttattggtagctaagtgacatacattaccaggcactagattatagagtatactgaaataattgcgccggcaagaaaagaattagaaattcagtcaatgcagttttaatgaattgaattaagaagtcagaataggcgttcgtactacaagtttgacaccttgtgttcagttaggtgttcagctgagcccgggcgaccctgaagttgacatagcgggggggagtagaacatagcccacatttgaatatgtccagcccctcaaaaaagggaaaagagcaggaatagtaccaaggactatatctgtgacataacaaaaagatctggagaaatcaatagttaactatatatgaatacaatcaaattccttagcaagtatacaagaataactacatggccccataaaagcctgtcatctgggataggtagttacgtatttattatgaatttagcaatccctaaaatattatggactactatcaaaggacctatgaatgacatagtttaagaactgaaaggtaatactttatgatagccaagtgaatagaataacatatggaaaggactccggaggtgcactgtgttgcctggggttcccgggggtgtgtcgcatgacaaggcccagagcctaagcctaaagcagagcgaaaatgcccggggcacttcgggggtgccttttgctatttagtgggtacccccccccccccccccccccccccccccccccccccnnnnnnnnnnnnnnnnnnnnnnnnnnnnnnnnnnnnnnnnnnnnnnnnnnnnnnnnnnnnnnnnnnnnnnnnnnnnnnnnnnnnnnnnnnnnnnnnnnnnnnnnnnnnnnnnnnnnnnnnnnnnnnnnnnnnnnnnncgatctccggtcctcttccccccttccccccccgaaaaacaggaaaattctcttttcttcaccccaacccattctctcggcttcaaaacaatggcttccaaccaagatgacacgaccgttcaggtcaacaaagaagagctcagacgggccagcgacttggtaattttttccctctctttttttgctctctgacttttgtattttctgcatttcggttcttttcttctgttcttctgttttcttgtgcgcattcccaagtgcgcgcctgctacgcgtcgcgttttaggatctataaagctacccattaagctgttgaagcttagactatatcatctcatacttcagcatcatgttggcaagcttcatgtgcaaaagaaaagaacatcccctgccccttctcctctattcagactcgcagacccatcttgacatcgcgactttcttaccaacttacgcgcttcctgactacccctcttgcttccctaaccatatacccatacatatacacaatgaataagcgtaattgcccttgatataacaccgctaacaatgcctcatagatcgtcatgcgcctcatggaggtgcagtcttacattgctgacctaggcaaggcctacgtccagcatgtaaacaacatcaccgaaggacgcgatgccaacattgagctccccctcggtccctctggattcatgggcccggattttcttttccgtgccggcagccccggtgctaagtctgaggctggtggccccaagaagcgcaagcgcgcgcccgtcgaccccaacgcgcccaagcgtgccttgacaccctacttcttgtatatgcagcacaaccgcagcaagatcgccgccgacttgggcaatgatgcgcgccccaaggatgtcgccgacgagggcacccggcgctggcagagcatggaagatacccagaaggaggtatgtattggcatcaaatcagttccagcttagtattgtactcaagaatacagagctaacacattcgcataggtctggaagaagatgtatgccgccaactacgaccagtacaagcgcgatatggcagcctacaaggccagcaacaaggttgaggaggaccacgatcccgcagccaaccaactgcaacaggactttgccggtgccgagcccgaggctgaggctgaggctggggtcgagggtgaggctgagcacgaggagtctgccgaggagtccaccgaatcatccgacgagtcgcagtccccgtctcccgtgaaggaaaagaccccgccgcgcagcaccaccaagcgccgccgcagtgataccaaggccaaggaagccgagactcctgccaagtcgcctgtcaagcggggtcgcaaggctgcggagccggtgtcaacaccggctgtcaagacaccggctgaaaacaagcgtaggaccaagaagcgcaagagcgaggtgtaaaggagtttgtgatgctttctgctttctgatttgcttgactccggggtcagatgagatgggtatcggtctgttggattggatgtgtaacccctcggtttgcctttttcagcggcgtttggagaaaaactgtacctatttagcctgaacgagtgaaatggactgatcataggacgtggtttctagatatccccatgagttctagtatctatggtaggtcagggctaaatagtaacccgtggacatacaaagccagataaaagaaaaacagactagatctcactaactccaactaagtcccagtgcattaattacatgtaggtagttgattagttaactatcaatttagcaaagccttgactaatgtcgctaacctccgttccccggcccaatcggcctccacggtcacttatcatgggcgatggccttatcagagaagaaagccctggacgccatttgaaatgtaccgcatccccacattcctcgcttttttgcctttcctacttagatctccttgaactgcatcttctacaccttcactaactcttgaggtttcaaacttgctcaaacagcctgaaaattcagttatcctgcacgccaagaactgccaggttcaggttccacatgcactatgcagcttattccgaaggaggcaagtcgcacatacattcccccgagagacaaacaactaacacccctgtagcttgacaagcttaccatcgcccacctaggcttcttggcacagcgtcgtttagcacgtggagtgcggctcaaccatgcagaagctgtggtatgtgtatcttcaagaggtgtaggacacgaccactaatatcccccaacaggccctgatagcctcagtgctacacgaggtacgacaaacgcatccaatcccctacaatgatatcaggacatactatatctccaattgattcaatgcgcaaactaactcaaacccccgcagttaatccgcgatggccagtactccgtcgccgatctgatgtccatcggcaaaacaatgctcggccgccgccacgtcctcccctccgtactggcaaccctcgtcgagctccaagtcgagggaactttcacctccggtacctacctggtaaccgtgcaccacccgatcagtagcgacgagggcgacctcgagcgcgccctgtatggcagtttcttgcccgtccccgcgcccgaggcattccccgacccggacccggaggatttcatgcctgagaagatgcccggcgcggtgattcctgttaagcatgcgcgcgtgcagttgagtgctgggaagaggcgtattaggcttaaggttatgagcaaaggggatcggccgattcaggtgtgtacatttcattcaatttacacggcgcaaaggcaaaaaaagaaaagcggagagaagcaagtgatgctaattacagtgttgattgccaggtcggatcccattaccatttcatcgagacgaacccgcagctgcacttcgaccgcttgcagtcgtacggtttccgactggacatccctgcgggcacatcgatcagattcgagcccggtgatacgaagacggttacgcttgtcgagatcggtgggaatcgcgttatccgcggtggaaattggctggcgaatgggccggtggatatgagtcgtgccgacgagattataaccaagctgcagatagctgggtttgcgcatgtgccagagccgcaggcggatagcgcacttgttgctggattctcgatggagcgcgaggcgtactcgcgcatgtttggtcctacgacgggggatctggtgcggcttgggttgacggatttgtggattaaggttgagaaggacatgacgacttatggggatgagtgttcttttggtgggggcaagacgctgcgcgaggggatgggccaggcatctggtcggtctcataccgagtgtgttgataccgttattacgaatgcgttgattatcgattggactggtatctacaaggctgatatcggtatcaaggatgggcttattgctggtattggtaaggctgggaacccggatgtcatggacggcgtgcatccggatctggtggtgggttcatctacggatgtcattgctggagagaacaagattgttaccgctggtggtatcgacacgcacatccacttgatctgcccgcagcaggtggatgaagccctagcatcgggaatcaccactttcctcggtggcggcactggccctagcactggatcaaacgcgacgacatgtacaccgggaccgaatcacctgcgccagatgatgcaagcatgcgatagcctgccgatcaacatcggcatcaccggaaagggcaacgactgcggaaagaagagcatcgaagagcagatcctagcaggcgcagcaggcctcaagcttcacgaagattggggctccaccccagcagcaatcgacaactgcctcgaagtctgcgacaagtacgatgtgcagtgcatgatacacacggacacactgaacgaatccggcttcgtcgagcagaccatcgaagccttcaaaggccgcacaatccatacctaccacaccgaaggcgcaggcggcggccacgccccagacatcatctctgtcgtcgaacaccctaatgtcctccctagcagcacaaaccctacccgccccttcaccctcaacaccctcgacgaacacctcgacatgttaatggtctgccaccacttatcgaagaacatccccgaggacgtggctttcgccgaaagccgcatccgcgcagagaccatcgccgccgaagacgtcctccaagacctcggcgcgatcagtatgatgtcctctgactcccaagcaatgggccgctgcggcgaagtaatcctccgcacctggcacacagcgcacaagaacaagacacagcgcggcccgctcggaagcgacgccgacagcggcgcggacaatttccgcgtgaagcggtacatcagtaagtacacgatcaaccctgctctcgcgcaggggatgtcgcatctagtcgggtccgtagaggtcggcaaggtagccgatctggtaatgtggaagtcggcgacattcggcacgaagcctacatctgttctgaagagcgggatgattgttactgccgagatgggagatccgaatgcgtcgatcccaactgtcgagccgatgattatacggccgatgtttggtgcgcgcgtcccggctacgtctattatgtttgtttcgcaggcttctatcgatgcggggattgtacagacgtacggattgaagaagcgcattgaggctgtgaggaattgtcgttctgttgggaagaaggatatgaagtttaatgatgctatgccgaagatgaaggttgatccggagagttatactgttgaggcagatgggatgctttgcgatgcagagccggcttcggagttgcccttgacacaggcgtattatatcttctgaggatcttggtggcttctttctgttttgcatgcttttagcttttccctttggtctttacagcttctttatacctcgttactcttctgagttggacattttgcacgatatggatttctatattctaacgaagcgattttcttttacttttacttttctcaaacggcacgtaagtcaataaggaaacaatcatggatcaagcgagctatctttttctccttttctctcctcaaaaccctaaagaagccaaggtcccctcaatagaatcaacaacaatcctatccgtcctgcgcccatcagtattaacaagaatatccgcccagtgcaacaaactagcaataagatcattgcacatgaacggcacattatggctatagaacccgtacggtttcgccaggacataagcgttgccacgagcatcaacagccatagccatagaggtatccttgatccgatgaacactagtaacaagctcacgtagactctcagaaacatcctcataagcctgggggtccgctctcagcaccctcgcctgcatccctaaaccggagacaaacgtcgcgcgctcacgtttaaaagccgacacagggccaggtcggggaggcataatagccatagcgtcgtaggagagacggtaggtcgaatatacgagaaacaaaccagtagtaagtgataatccaattccagaacctatctaaaagcacaagttagccacaatctgatcaatcagtctcgccacagcaataggaacgtcagtgcaaaggttatcgcgcagccgatccgcaagataggcacactggcccttgatcgcggcgcagtgcataggaacgaccgtctcgtagaagccactctgttgtactaggacgtagggatggtgacggctctcgacggccatcttcctcgaaagagaggcgacgatgtcgatatgctggatgagctggaggcggaggttggggatcacatacgcacggctgtcgatgtcgtggcgtaggaaggtcgattgctgctctaggagggtcacgaggttgtcgcgcgccttgcggaaggcggagacgcgggcttggtttatatgcgccatggtgatgcgaatgaggggattgtgggggctatagatctagatggaaatggaaatgttaatgtgaatgaatgtattggaacgtacctgggtctggagctgagatacagctacagctatagctacgccgatgttgatactaatgctgatactggcgtgagtccgcaactcgacggggtggaaatgaggatctagatgtagcccaggttagccagtgcatgttccagatggagtgcgatctcgtgctcggtgttgataatgggacggtggatgtggtcatggaggatcttggccatctggagggtatcacggccgaccatgtcacagatctggggaatggtgcaggtgaagtgggcgattccctgggaggtgacatatttcatgtccgcggcatcaacagcgagggcttgggaagcccacttcaccttgtcagcctgaaccttcagggactggatgttgagggcgacctcaatgaggtagttgccctcgggcatctggcgtaaagtggcgatataggaacggatgttgtttactagaataccgcgctccttccggtacttgaaaatagcccgagtaccacggaaaagtctagtaccgatagactcaggcattgtggatgaacggggaggggctgatgtcctctggtgatatagaaagggagagatgaatagatgaatgggatgtatcacttacctgcttagggctagtggattaagtgtaaagctgagagtagagtagactgaactggttgtactgatggagaaagaactgtgaggcggatgattcctcgaaatgtcaaggaataagggcctatttatgcatttgcatctcactggcttgaatagcctgtagacaaggccttcatcaagaagaaaggaatgaaaggcatatgacttgttgttgaggaactttgttctctttgtcctcagatatgtaagtagtcatgatgttgaaagaaattagtatacaagggaaggggaaggtagttgcagggtagaccaaggctttgttataatattagattcgtatggccattgttcagttctttgttctctatagtggaatcatcaagaaaattatgatattgatgctttactcgcgccaggtttttagggtttgtctcgacaatgtagggtcttttattggtggaccaaccttgctgtttataggcccacaaagctgatgtttaagggtaacagtgcagagtaagtgatgtattaatctggagcacgaaaatacttttgcaagtcagtgatccatctaggcaattctatgaaaggaacagaaacccacgatggcatagttcctgccattggcgaaatgctagatggcaagatcgagaaaaaaactcagaggggtatcatatatagtaaattgaagaagatagaaaaaacaaaaggacacagatccatccgcctaccaatatgaataaattatcaagcctatagctcaatctcctcctcaccatgatgatcacccgccgaaagaattgatatattcgtccaagctgagaaagtaccttcgcgcgcagctagataagcagcaacacgcgcatggcgtgatcgattcagattttcttctcctcgcgctgggtcccgtagcctatttccaacggaattttggtccggagagtcaaacgctgactcggagatggagagagcaagtatgtctgtgtgttgactgtctgttttttggttgattggatgaggagatgaagtaccgtcgccagttaggtcaatgatccctgtagatgtgcttggttcggacctgtgtcggagccctctagccgaaggttctaaatatggctggtcaggtatgagcgtatcctcttcttcacttccctcatcactggccggatcaaacctgtcttcctttcctgtcggccatgtagacgggagaggattgacttgaaacagtctaggctctgcatgctcttggagatatcggtgtgcttgacggatttcgttgcgtttaactctggccgcctcttcgaattgactcaaacgatgtagagagtcctgcttctgatcaggatgacggcttgcatcggcgataccaaggctcaaatcttcaattccactactggattcttgtgtggactgtgtagagaggtccatgtcgtaccgggccctttttcttgcgcgcaaatctccctcgccatcaacatgattagctacaatttgctgcatgtaattgtcgtgtgaaaaatcggttcctgagcagaggtggccaaacaggcgtctgatggagatgtcttcgttccaggtcgttggatccacggtgcatggatgaatgtccttgggccggaaggcagctacgagctcacacagttcggagtaggaagagtgtcgtgaatatgggaaccgctataatggcattagaggattatcgaagaaaacagtagtgccacttactatcgtgttgggcaggtctgtctgggacgaccggctagatgtatcagatggaccatggcttagagcggtcaccagattcttcaatgagatttcaccttcctccttcacgccatatgtatcaagcgagagcgccttctttctcgactggaaagcatccataagggcacctcggatctgagaaagggcttttttgtcctggacgtgtttgagacacagcttctctaactcggccaatgtagattcatctggcagctcgagttcatgagtttgatacaaatccccaataccaccacccgcaccgacctcagggatttccgcaccgccggttgtgcgattcacaatgggcacaatgtagaccgtgttagtgccgcgagctgccaaacatgagaccccaggctcgcaactgtggattcgactcgattcgtcgttgcttaggcagcctgttacagctctgtttcctagctcgaagccacagagagcagggacttcaccaacccccctattgcctggagtctggactagagaccgataaagtcccatctggtaacgatccacatggatctacgctaattagcgaatgctatgtttgagcggcgtggtatcaatcaccttcgtgttcagcgcagctgagagcgccatccaaacatcctcgtaaccgaatgtccacgcacggaagtagaagactgtatcatcaggataagcctggactttttgcagcagctcagacagtccctcggccttggaagggaactccaggaatgggtttgtcttgcttgcaaatgtagagtccagatacaggttatccagccgtttctggcccagagtatacggtatcaagaccgggtggcggactaggctgctcacccaccatgtctcggctgagaataatcagctagtagttcaaccaagatgagacatcattgactcacctcggatgtcacctgtgtaaatgattgccttctcgtccccttgaattagaaacatcacagccccagtgcaatggttggcatcaaacaacgtcactctgatatgacgtcgaggagtgagttcaatttctgttggggtattcagtggaattgggcgctgtgtgggatgagcacctggtcaactctagtcaaagtgtagaactatactaaccagaagctttgcgagatgcttatagtgcagtcggcgtgactccaagatgcctttattaaagttcatccgatggggatacttttcaattcggaggagtagctgcgcatggtcagtttaaagaatttaataggatacacaggagcgtgcctctcgcgtggctggcgagcagtagataaacggtgcccgaaaggactcgaggccctgtaaatgatcgctatgcacatggctgaggaagcaagctagtggtgccggccgctctgggcatttccgaaaatagtcaactgcttttcttagccgtaagtttggctgatttcataggtgaagctcactgcgaatatccggaaactctgtcggatgattagcgtgggcagtgacgtggaagtgccggtctcaccttctacgatgccattgaaggtcgacatggcaacacattcagaagctgaggtcagattgcatgtccaaggttgcccaggtgaagatgtgctagactgctagaatgctaaacctgttgcttgcacgtgatgtgaacatagaaccgaaagggtcataaaacaaatccaaatatgtccaatctttgtataataaaactaattcagagcattatggttcgatggattatattgcatagttaaatatgcgaagttcaagtccaagtccagaaggaatgtgttctacgccttaacagctggccgtgcatcgtggccatgccatgccaacgcacacttgggaatcttagttataaagcccaagacctgttgtctcttcccaaactattctattttctttctgtttctttccagtttctattttccaccttcttctgcaattgactatcaatggtacgcctgtgagaccttcaattcccccaagggtcaaagagccgaaacgtcagctggggcacctgatcgagatttctcttctcttcttaattattatatccagtgacttgcattacgggaaatccaggttgaagaagcatttctgttgtattctcaagaatttactatccgcgccgtctctagcgttgttaccccccactgccaactgaagctctcctcacccccaaaacatccacgtccaaacgtccgggaatttgacaaagggcaaggggggacccttcagggctggatatcccgaatcatcacattccagggtgcctaggacgacctcgcctcttttaatttgctcctttacctcttaactccctccacatccgaccttcaccatgcgtaaaccgtccgtgggtcaaatcgtgtataacgccacgtttccacgacctcgtccaaacgacccagggtcgtttggtgctcacattacccgaaacctcgtcccagaagtacgtgtcgaaacatccctcttctacggctcgctagactgcatcgaagcacaatacccggggctggactactcgtatggaccgcatcgcatgcgactgggtcgtttcccttggcaccgaaagctatttcaaacttttgaccaacttggtctgacagaggaggagatctccaatctgtgtcgatgggaagggaccaagtccgcgcgtcagcggtacgaggcagaagaaggcatcactgtacaggacactacagcccactcggtccgaccggcatctcctcaacccgccccgtcaatcgagatccacttcattgactgcgacttctgcgggacagaagaggaagatgaccagatcatcgagactcaaagcaatgacacggtccgtgcgatcgattcccgagcctccagttaccggtccgccgaggagcacgaaatcgaagaggaactaagcgacgaggaaatggaaagttgtggcgtagccctcaacaaccgaatccttgctgcgatggccgctcgcgaccaaggcactgatgtgccgctggatgaagactgggaacaatggctgaaggaggctggagaacgtggcagtttcggtgagatggtgcatgctattcgcgcgaaccagcccttgactcttgtcgccgacaatgtccgaatcccacgcggtcgcggtgcggctcgtgtggtgacaagggcggccttgttcacagtgccagacagcattatcgcaacaaacactgcacttccatctacatccaaccatgcctccggcacggctcaatgactgcataatatttactcgaccatcagaccctttggatagagccctgttctgattcgtgttttgcatttttacggcgcatcttacctctctcgcattgtctgaagtggactggctccttcttctcggggttccctttgcttttctttatctatatccttacgacacccccagaagattcttttgcatacgcatacgcatagatttcattgtctcctgtctcattttcattaataccctcatgttcctactcctcatcatgctttgttgtttgactcgttaactttttcattatttgctgcgccggggatattcatattcaacgtgttaatcgggggattttcagcaaacagcaaaaattattctaacttactcagaaatatatttacgaatatcattcccatgcttgtccaatatatgagtagcgtacagctcgatctgcagactgaatctgccttggtattgaacattattcaaaaaagctagtttttggggataaaaagagtggaatcaaatatcatggtcctgtccgacacgagaaaaatcccatgctatgccctcatctttgttagtgccgaccacgagctttacgccgtctctccgcatcggcaagaatccactgccccgatttacgaggaggacatagccgccattcggatgttgtcgcacacaaaacgattcgtagtcccggtgcaacttagcctccgcgataaattcacccttgttgttacgcccgagaaaggtgccggaaaccacgttttgaaaccccaacaatctctcgtcggattcgacgcatgaccagtggataccacccacgtactcactgtcttcagggacaaggcgtaaaatgcctctctgaagcccaatagcaaggcctgtcaaagggcagcggatgatgaatgatctgcctttccaaggacaatgcctagagcgggcttcgatatactccataagggagcctatggattcatcgtcaagaccaccagatgtgggtgtatcgcatttccgatcttctgtggtagtggaagacatcgtttcttcgattcagagctagaagggaaggatgttgatttcctttcttgttggcttgcggctaagttggtcaaccttattttgtagccattgtttgagggaagactagggatgtttacagattaggagcccctgtgagatgtgtgtagaaaagaatatctttgaataaggaaaagcaagacgtacaacatggagtgagttggtagacaaagtgcggggatagctagaaactatgtatcacatgatctgagctttaaccgtacacagtctagcctaatttggaatagtctgagagacattgacttcgataagctctccgctccgaggtccgctccgcaactgatctccatgccatgaacatgaacatgaatctcatttcagctttgtgtttgattgaatttggccaatagcctgcgctgattcacaccctgcttagctttacacattcatatcaaccctacaacacagccacgatgatcaaggcaatcttctatagtaaatttgacacgatagagggtaaggaccttcaataccatgatgaaccttgaattcgttacatactgactgatgttatgcagggcccaaagtcgtccatcaagtccccgacggagctatcgtgccctccccaaccgcgccctcacaaccacccttcctcactttctccgatgtctccttcttcgtgatcccccgccaggagctctgtgggaaccttttgcaagtctgcacaaacggatatcgtatcctgggatacccaatatgcatgaagtctgtgcggtatgaccggaatgagttcatcttcaacttctgcatagtcctcgcagaggaggacgactttagcacgtataagagcgtggtgcagaaactagcagatctaatgcatggcctagaagagcagaatggtttcttgtcccgtgatttctcgaagagtggtgaagggaaggtgtatagtctctgtgagatgttgatggaggacttgaacaactattgcgagtgcatgattcccattggtatgcccatgaacctgtttagcgtgattccgctgctaattattctacccagacgatttaaacactctgaatatcaagcttttcccgatatacccttctcccccagccgtcaaggcctggcaagtgccgctcttcacgttgcgataccaggctttcatggatgagaactgggatttgaccatgcaaagggtatgtgaaagatgacaatgagacccccccccacccccatatggctaggaagacagcagctgaaccccggcagattgtaccacatatcaacggcgtcaacagcgtccgcatcatctccgtactagcagacacagacttctccctcacctgccgcgccctccgacatctcctctactatggctgtctattcatcctcgacatcttctccttctccgccatctacgccccaaccgcccagtttaccgcaacaataggctccgacgaagcaatgcaactagaatgtgcccgctacgtaaacctccgcttcgcaccacacccagcaaccggaccctcctcccctccaccccccagccttatccccagcccaagcgccaacggcagcacaaatggcagcttaaacgacagctccgaaacagctcagctctccagctcccttaccgacccaacacctagcctcacacgggaagaatcccgcttcgacgccgaagaaatctggcccctcctaggcgccgaagaaaactcttccacctccacctccccaaaaacacccccaaacacgctccacaaaccagcgatcgttgacggcgccgcgctggtcgagctatacgcaagcctaaaacaaggccagagcgtcaagcaatggtacgcaacgcacagtcgctcgctagccaacattgacatccgtcgcttcatcactttcggcgtgataaagggcttcctgtaccgcgtgcacaaatatgcctgtgcaacgagtcagcctgcccccccgccgcgtgcgtcctcgttcacgccaacggctctgtcgtcgcgcgtcaataccggcaccaatacaccctatgcgatctctagtgtgtcggaggacgcgtctatctcgacggctgcgaggagggagtctagtcgtgagcgggctgggtcggtggtgagtgggggtcggaatgcgaatgggagtgcgggggcgccgtcggcgttttgggacgaggaggatgaggttgtcggggatgaggctcttgggaagtatcttgatggtacgcattgctttgatcagatttgtacggagttggagatgagtgagagggagctgacggctagattgaagaggtatccctgggaggtattgattcttcatagatgagttgggggagtttttttttggcaggtttttttatattgtcggaattgattgataccctacttttgcgtttatatggttcccaaggtaccgctggagacttgaagattgggaacctttgtctcattgtaagctcacagcttgggacttaaggataagaatatatgaacataatcacatataactaggtagttagttatagtatgttgtggaaaagacccagtgtaatttcaggcggactacaaaatagccagcagttcaacatttgatgttgtggaacagaaaaaaaagaggtatccgctaacgccacgctagtccatcatgcatttgtatcgtatcgtgcaaaaaataagtcaaagttgaggtggctaagaggcagccaaatgatagaagacgggttatcttcgagtgatgaagatccggcagagaacggagagggaggaatcattcctcgtcccagttctcaagctcggctttctcgtattcagccatgacttctgggtcgaagatcgactctccctcagagggaatggtagtcttgatgtcgtcaaagataggcaggaatgcctcgttccagcgacgacgacggtccataacaatctttgcagcgtctccgacagcaggacgggatactcccgcagaaccagcgacgtggctgccgccgcctgcgccgcctggccgatgcttgggctgagcacccttcttgcttttgcccatagtgcgggtgcgtttgagataggcctgttggacctgagagtcgaggtcgtcttggatggtagtaaactcaagcatggccatgtgctcctgggcaatctttagaatgcgagctttgcgagcattgttggtgacgatttgcctcttgagctcgttttggagtaagcggagtcgctcagcaacttcatcatcgtagtgagcgtcgtagtctggattatcatctgcaccgaggaaaccaatgaatcgcaattcggctttggcgcgttcgtccaattgggcatgatccagctttgcgaccgaggttttgaagtcgtttggatctgcgtcgcggaaggtggttgcagcagggagaggcttgacttcgcttttgttctccttctcaacggtgggttgatcaatgtccattgcgtccttatccagcccacttacactcgcagtatccccatttgcggttggattggaatcctcgggaaaggtacggtgctcgtaacggaggagagagcagaggcggctgaggagaggtccaaccgagacttcgttggtttcggctttatcgtcagtcagctgttcaatgctgccacggccttgattcaaaggcagctggtccttgtcatcttgactcgagtcgtatgacactccatcctcctccgcccaaatttgacggtagtttttctttgcgcggcggggcatgatgaacggggtagtgcgatcaccctgtgacaggtcagcttgtgctgactgaaagtagctacaattgacttaccctttcttttaaccaggcaatgtcctcctcggtaagaggccggacgtaaggttcaatgtaagtctggaaagtattcgcgctgacttggttggaaggtttggcattgctgaagtccttatcaggagccacacccgctgccatatgagcaagatcggtcttagggaagtgagaaacgctgtaaatctctttcttatcatcgtccgtcatgcctgggagaacatctcgaatgttgtagatggtggggtcgtcaaacttcagcgggttatcgccaaagacttgcacctgaggaatcgcaggttgaggttcaggttggtgggaatcggcactggtttcagacccgggggtcccggggggagggccgtcaacagcagtggttgtgccattgggggacatcatcgatggaggtgaaagcgaggaactttcatcagatatcgcatttttggagtttttcgatgctggagaagccgctgttggtagttagcgaaggctgaacggtggggaaagtgaaagaagatcaagttgtggagatgggtcggtaaaaacaaagagttggaagaaagcgccgagttggatcttttcttacctccctcaaccttagtctcagctccatcctggcgtgctacctcatgtgcgccatgatttaacggccgctcctcttttccacttgggcgctctttccgcttcttcagcttcccgcccttatgaatatcgtcgtcctcttcggtttcacgtttcaacttcgagcgatctcgaacttcacgatcaagctcctgatcgtccacttccttgcgcttttgagacatctcgcgcattccggcattgcaaacctcgcctcgaagatcggccatgtcactaagacccttcaggtgctccaccaatgcctccagtgtttttgaatctggaatgttctgcgcggagaccaggtccaacacatcggagtactgcacgctagccaagtcaatgtgcttggtgacatcgttctctaagtagctttggataggtagtgatgggatagcgggagcactagcgctggacggggtggtattgcggctacgcgactggcgcgcatcgcggcctttgcctttgcctttgtatgcggatggcatggtatttctgcagaccgattattggacgaagcgaaaagaagagatgaattgattaagataccaaagacagcagtatcaacgaagagagagattgattgacagaaaggttcctaggaggtgtggatgggactagacagacacatgctgtcgtcggtcactgtgagcgaataataatgaaaggagattgaatgtcccctaaagttgcctgatcataagctaaagcagacacaatctctcgatcatggatgaattagactttctagaggtgatgatggttggcggtcgctggcggtcggccagaatatgcacgtgatggcgatccgacatgtatcatcacgtgctccatcttcaattcattggttcctgagcacttggctatggaactttgcctttgagcttattcaatttttttgcactgtatatacagcttgcacctcaccacttgttggctcacacatggtctagccgcccaagaatgtggttgaggttgaaatctgatacacattcctacagttctgcggagggagccccgatatcggctactccgacattctgagggatgaggcagagcaaatcatgtgttttttgtgaattgttgcaagcgttgaataattactatttataacacagtctcgctagttaaatcccaatgtcaagtgtaaaaggttggaaagttgcctgttgatgatcatctcctcaaacggtctaccgtgaacggccatgtttagcgaagtacacgatatagaccacgcgctcggccatttccatttgttgactcgttcccggagatatcttcgaaatgtgaaactcagtgtatcttagccaagccgttttgcctcttgcctcgtggttggaaccagtattgttctacattcttgtgacggtcccgattgactctcgcattcttccgctgtagagctctaaacagcaatggggatgtatgggatgcttcagggctcagcgtcgtcttaaatgactttgcatagaaccatagtggttgccattttcaaactctttcatattcaacttgtttcccctacgccttccccgcgggtctgaagcatttagactcatagtatatactttacttgacagtcaccttcattattcacttgacccaagatcagatatattatgtcagctgctaccatgtcaacgcgaaatgactcggtgggtaaagtggctacactttgggcaggttcagggcaagcttcgaattccacctcgtcagtcgaagtaagtctgccttcttcattaaaagccgacaacagcatttggaactgattctaactcacataattacataggagaatgtcgcctatcggtttgttctcgaccataaggttcaaacaatatcgagcaatggcatccccgaggatggattggtatcaggcctcttgtttgtacccagtctagagccgcatgatccgtgctatgacattactgcttcgtccgtgccgtcaaatgtgacccgatatgaagatgtgtctgacttcggatactccctcgttggccttgctccatgggtaactgccgaatgttcgctatcgttcctctcagccgcccaaaaggttggcacgcacgctatgatctttttccagccgtcagataacgagaccggcataccacctgactcgaacgactctcgctgggcaaccagtgacggagataaatggcgaatggacaacgattacccagtgtacgccattcctggcccagctggaactacattgatcaatgatctctcgtggtattcaaataagacacccgaagacaagagagacaactctaccgaaaattttgcgctacagacgaagacaaaccgattgtttgctaggattgagactggtaggtcacaaaaatgcgttactttcgaatctatactcacatatcgcaggcgaagaaacacaaggggcgtcgacgagcgtttggagtttcgtacttgcaattgcaggaacagttcttatactcagtatcctcctgatcattatctatcgatttgtcctgcgtaagagacgcgctcagctgcagagacgtgttaatgcaggtcaagtcgacatcgaggccttggcattgaaccaaatgacggctcctcaagaggtggttaacaaaatgccacgttatacatacttggagatcatccctccaacagaagcaacgctgccacaagataatacatcggccaatccaatcgagcatggctctggagacaagatcaactcgctatggctcaaggaaaacaaccatgcccaggacgatgctggcctccagaaacccgaagcagcgatgataaagcctaaacagaacgatacttgcagaagcaagtaccgtctgagccatactcaaacgacttgtgctatttgtctcgacgattttgttgttgggtcatctacggtccgcgaactgccttgcggacacatattcgactcagcgtgtatcgatccattcctgacccagaactgctgcctttgtcccttatgcaagaagagcgttttgccagcaggatcatactatatctctgtgacgaatgaaatggtcgaacgagagcatctttcgagacgcccttgaatgcagcacgggagactgcttttgcgtgcttttagattatgccagcatggagagagcgaggattactagttgcatttactaagcgaggcgatttgacgatcttgatgtttttgtatgatgttttgatagtgattgtatcaaatcaaacaatttaaacaaaattatccaattatggaattacaagatcagtcgccacttacccggtctctgtccttgaagatggtgcttctagtatgcctgttttaatcctggtcataagaaggcctcttcctattttatccttttactttcattcaatattgctcagaccattcatcactaggacatgtaattaccaaattagaataattttcagcctgaggcaggcagatgatgctgacacctgattttcaaggcaaagaggaagctcacactgtgattggccctggtgggtcaactcgctaatcgctagcgtcccacacacaacctctgcctccagaccttttcttcctcgaacttttgcgacaacgacaaccgacgacatcgtacagccgacaaggtacgttagcatttttttttcaatacaatctccgccgcaagtgcacttctctgacttataaccgtccagatgggtgccctcaagtacgtggaagaaatccagaagaagaagcagtccgatgtgattcgcttcctgctgcgcgtccgatgctgggaggtgagataaatcccttcgcccccgattgcctaacatctccgccgagcactggtgtgcgttgccttaggatatgccgtttttatgtggtattgctaggcggctcgaacaaagtcattcggcggaaatgattgtggcacgcaagaaaaccctttcgggcttcatgtgtcttgctatacactcgttgaacattgctgagagtgcataatatagctccgccagctgaacgccatccaccgtgcctcgcgcccttcgcgccccgacaaggcccgtcgtctcggttacaaggccaagcagggttacgttatctaccgtgcccgtgtccgccgcggtggccgcaaacgccctgtctccaagggtgccacttacggtacgaatttttcctgtcgagagcagatttcctagagatctgagggaattgaaggaatttttttagctaatgtgcgattatgtgaacaggcaagcccaccaaccacggtgtcaaccagctcaagtaccagcgtgctctcaagtccaccgctgaggagcgtgttggccgccgcgctgctaacttgcgcgtcctgaactcctactggatcaaccaggactccacctacaagtactacgaggttatccttgtcgatccccagcacaaggccatccgccgtgatgcccgcatcaactggatctgtaaccccgttcacaaggtaagtttggctcgaaatttgactgtgttgcccgcgagctttgctgatctggtccccctttctagcaccgtgagtcccgtggccttaccgccaccggcaagaagtcccgtggtatcaacaagggtcaccgctacaacaacaccaaggctggtcgccgccacacctggaagcgccagaacacccagagctactggcgttaccgttaagtgcggtagtgcactttcccagtggtttcggttggaaaatattggttacggcatgtggtcatttattcaaacacttctttcccagacagtgttttccacgctgggctcaactttaatgcagaccagtcggttctgttgttagccaaaaagccatcttgttctatgtttcaattcccttattaacgaagtatgactggttcagctcaatggtactggcattgtagaaagtgtagtcttgaattagtgctactttttactagttctatgtatgcatgtatgcatatcactgattttcaactcccagtgtcacatttgcgggtggtgtactccgctggacttgcggtggccagtcgccgttagatcgaacctcagtggatcgctagaaagtagtctagtgcacataatacatattcagactttatacgctaaggctgtctttgattgttattgtgtaacgatcatcgatgtgcgttctaactagttaacgtaatccactaccgagctggccacaccaccgagctggccaccccacccaaaacgcgtccatgaattagcacttaatgaattcaaccacccaccatgccactaattcgctctcaaagctctcgaaattcaatagagcaagaaggcaggatcttattagctatccaggctattaagaaccgagaaattagttctattcgggaagcagcacgcatcttcgcagtactgagatcgacccttaccacgcgcctccggggcgtacaaaaccgcgcgatttctcggcctaactcacataaattgacagaaatcgaagaggaatcgcttacaaaatggataatatctatagattctcgcggatcagcccctcggccctctactgttcgagaaatggcgaatcttttactcgaattgcgcggaataaccccggttcttttagtcggcgagaattaggttacaaagtttgtaaaaaggtatcccgaactctcaagccgattctcaagacgctataactacgaatgtgtaaagtgcgaagacccgaaaactattggggagtggttttatctcgttcaaaaaactatcctttaatatggtatcgatcccgacgatatttataactttaataagactggttttgcaataggattaactgtaaccgcgagggttattacgagggctgaatattacggttgccgatcgcttttacaacctagaaatcgcgagtgggtgactgtaattgagtatataaatactttgggatagacgctccctctgtatatgatttttaaaggcaaagtctttattaaatcttggtttaacggcctccctgatgattggcgatttgaagttagtctaaacggatagacctctgatgaaattggacttcgatagcttgaaaagctctttattccgtcgacttctttatagacgaaggggaggtattaacttctaatacttaacggccatggaagtcatttaaccccgaagttcgacgaaatttgtgaaaaaaataacattattccaatctgtatacctccgcacttatcttaccttttacagccacttgatatcggttattttgcggtattaaaacgcttgtacagttggatggttgaaacgaaaatacggagtgggataaattatatcgataaacttgatttcctcgaagcttacccgtccgcccgaatcgaggccttcaaagaagatactattaaaaatagcttcggagcagctggtttagtgccttttgaacctgatcgagtgattttaaagcttaatattcgccttcgaactccgacccccctttcgagctaagagagcgagtgggagccaaaaacgccttcgaactataaacaattgctaaagcaagcttcctcaattaaagcattgcttcgtacgaggtctcgaagccctccgagcccgcttaattctgcgataaaccaggttttaaaagcctgtcaagttacaatgcaatcggctgcttttctcgagaaagaagtaagcgatttacgggctgcaaacgagaagcagaagcaaaagcgcactcgatctagaaagcagataccttctaccgagggcctctcggttttagaagcatcgatattaattgtgcagccagaggaagcaattgaaccacctccccctcctcagctaagaaggccttcgccacctttattaccccgaacgagagtgttaaataggtgcggagcatgtggaaatctcgggcataaaagaaatgcatgtccagatagacctagatagatagttttattaatttatggcgttttggttgagatatattgatttaaaattcagaggttggttttggtggccagctcggtggtgtggccagctcggtagtggattacgttatttagactttcccatcaccatttccccatctgatacatcccaacgaggccaatttcatcgtgagttttatttctatctttacacgcttctaatagctaacatctacacttggactaggcactctctgcgtggaccctacaagcaaagtcaagactctcatctatttaccctcatctaccaccaagatgccatccagtgacgcacttcgtatatacccccccttctgcattccaacacaaattgttatctatggctgactttaactggaacagaaccgcctcttacgcccgctgagcgggcaattgtcaaatcctacggcggtagtggattacgttagttacgaaattagacccgtagcccgaactttcaggtctctaatctaaaaataggcctttaatgccttaggcatggaccacttccccccccggcctctttcccaatccgtctacagactatgaactgctgtaacgatccatcactctataatagagtccgaggtaagatagtcatttgctcggtgagacttgattagattactgaaggtccatttctgcaatagaccaacctgtcatttatcaaacaaagaagcaaagctcgctttactcgactgccttacccccactccgtcctcccgtcctccacgtatgtgtttggtacgaaggacaagctccacgagctggattacatactggagaggtcgaatttgatcaaatcaaatcacatcaaattgatgcgcctctatgccgtcccggcctgaacgtcatctgcctatccctccgatctcaagtgctggcaacgccgccatccctggaatacacccttcccaattttctggactggaaatcaatccacgccgtatggctcgacctcgcgatgcttcgatcatgcccccattaaacggcggtacccccaagagttcgtaccaccgaggacattcacgctcgatcagcaatccgttcgctgggtttgggcgaaaacgggacaagacagtcgccaagtatgcgacttgggactctgacgatgatgacgacgatgaggtaacatatcccttggagccagagtcgtcaagtccccggaaaggtgcagcacctggaaatgatctcgccgagggcaagtgtcagacttgtgatgctaccgtccggtggccacggcacttgaaggtgtttagatgtaccgactgcttgatgatcacagacctcgagccgatttctcatgattcaaaagacaaacccccacaagggtctcagggtggagcgtccaatttggcaagcaaaggtaacacctccagatgctagttttgcgtcatatatttgtaaaagatactgatttgctacctagtgtttcctttgacggccaatcaaattcgtggtatggtcggggggtgtctcaacatgtatttcgatagccttttggacaatagccctcggtcatggttgtcgccggacgacgacagaaagaacaaaccgctacctaatcttccgccaatgcaggatcatgcctctggtccaaaaaatctctcgcccccacgcactggcgattctcggagtcgtagtgcttcccattctagtgaacgggaaaggttggcggcgtcaaaagaaaactcaggttacttgacaccaccatctgttcgctgggagggcaatgacacgcctgtcagagtccgagcaaattcagatctccgatcaactccaaagctagacagccgcacgcaagacgtttcgcaagccgggaacccggagtttcaaagctgcgacaatcggacacacattttcaaacggctggaaaataccatcgccactgccttcaaaggctgtgactgcctcaacgaatctttcactacatatccaccacctcggtcagcccgagcagctagtaatggtaatccaccgaaaacgaagatggaaccgaccacaatgccccaaccagcgcaagacgctccagtttttgaaccagatgccaaaactcttcttttaggagatttgactgagaactcctcttggtggatgaatgaatgggctgagaccgaaggccaaaatcccgcatattccaaagagaagaacaccccaaagtctcggatgatatcatcgcgaagtcctcggatcaactggtccgagttagcccagtggtaccattcgatcctgtccgcgggaaattcttggaatgagctctgggccgccaaaaagcctgaccccacaagatcagaagcggatctgatccgagccaagagatgggcgtctattgatccgtccttgatcggaagacaagtcagcgagtctcgtttgcacttacaacgggcactcttgaaagctaccgagggcctcctcaaacgcccgcgccgtgttctgaagaaaccagaagataccaggttcttgttcatattgttagcgaatcccatgttgtcttcacctgcgtcttattatcagaatacatccatctcgccgtctcatcgagatgagaggcgcccatcgcatccaaaagactacctgaaatcggcaacccgagacggaaaacccttgcagaaagagccgcacaaagcccctgctcgtctagatggctccagtcaccattatggaattatcaaacgaatcctgggactcgcgtctaatttgcccaatgactgccatcactacatcgtgtcttgggcttcccgtttctctgttagacatttcgagcgactggtagaacttatcggtggatttctcacttaccgtttgagtcgccagcatgggcgaaaacgccctcaaaatcctcaaaacggagatgatctaataccgagctttgccagtgcttcgggaaatactgctgcggaactccacgctgcgattaatcgaagtagcccgaacaagaagcctggcaaaaagaccgaagaccccataatatacgccgaggactggcagatcagagcagcagcaagagtaatgtcgctgttcttcacggctaacatctcctctgcaacgaggaagtctgatggaactccgcgcagtcttgaagttcccaagaacccaggccctcgtcaaggacatatgattccaatcagtgcattctacaatacactgctggactattcggatttagtggcggacttcgagacttgggaggctaaagtctcgaagttttcgttctgtcagtatccgttcctccttagcatctgggccaaaattcatatcatggagcatgatgcgcgtcgtcaaatggaagtgaaagcacgcgatgcatttttcgacagcgtcctcaaccacacggcggttagtcagtacctggtgttgaaggtacggcgtgagtgtttgattgaagacagcctgaagggagtgagtgaaattgttggtactggccaagaagaaatcaaaaagggtctccggatcgaattttcgggcgaagaaggcattgatgctggcggcctgcggaaggaatggtttctgctgcttgttcgagaggtctttgacccgcttcatggtcagcgttttccgatcttagagtgaaatgactcgctaattcaaaataggcctcttcatctacgatgacgattcgcagtattgctacttcaatccttattgctttgagtcatccgaacaattcttcttggttggggttcttctaggtctcgccatctacaactccaccatccttgatgttagtctcccgccgtttgcgtttaagaaattgctgtcgtcagcggggcatgccaacgggccacaactggctacttccttgcgttcgaccttcaaatgcaccctagaagatcttgccgagtaccggccagctctcgccaaaggactccggggtctgctagaattcgaaggcaatgtcgcggagacattctgctacgatttcgttgcccaggtcgatcgctacggcgagattatcagtgtgccactctgtgcaaatggcgagaaccgaccggtgaccaactccaacaagcgtgagtttgtggatttgtatgtccaatatctgctagacacagccgtggctcgacagttcgaacctttcaaacgcggtttcttcacggtctgcggcggcaatgcactatcactattccgaccagaagagatcgaaatgctagtccgcggctcagatgaaccactcgatgtcaattctctccgggcggtggccacctacgacaactggtcacacccacgaccagaatcagtccctgtagtgcgctggttctgggacttcttggagaaatcagaccctcaagcacagcgcaagatcttgtcattcattactggtagcgatcggatccctgccatgggggctacaagccttattatccggcttgcttgtcttggggatgactgtcctcgttacccgattgcgcgtacatgtttcaacacgctgggcctttaccgctaccccacacgggggaagttccagcggctgctctgggatgcagttgtaaatagcgaaggatttggcttgaaatgatttgtttattcctgctcgggacttgtgttactattggtgtttgagaatttgtatagacgctggacgttgatttcgaagtgagctttgcatgttcatactttgcgtcgtgtttgctttctttcttttgctcttcattccgccatggagtaccggtgctgttatttcttgccttgcaaactgcacatgaggttttgtgtcttgtttttattgattcagtcttggtgactgagagagtctcgttctaatttgcattcctggacgttgttttcattctagcacacttgacatagattgatagatccctcacctcaccttcaagcgaactcccgagccttccatgtcaggaaagaacaactcaaatttccccatcaccacaccaacctcatacctttgatttaagtgatccgtaagcatcgatgatcacttcttgtatctaaatttagaaagtccaagaccatgctctttcttagagtttgtgtagaacaatgaaggaatggtttaatcaatggcctatatcgagcgttctctataaatttttcttatataccgtccaaatcatatactaattaccaaaatgcgagataacagaggcagctaacggtacaaaataccatcaaccatctcaccaatcgccaaacaactcgtcaagccagggctttcaattcccaacaaattgacaaaaccaggaagaccctcttcttcctggataataaagtcctggaaccccttaccctcattgacagcaccgttcctccctaacttagggcgaataccacagtaatccaacgcaatagcactaacgtcgacaccaggcatataagccttgatctccggcagcgcttgctccaaacgcgcagcactcggcaccaaatcatcaggactatccacccactcaacatccggcccaaagcgaatgcgtccagccatgtcaagagtcaggtgcgtacccagtccaccagtaccgggcaaagtcaccggatataccaaaaccgaagtcctaggcctggaagccgcatacgaaaagtacgtgcccttggcataatgcggaacgaaatggcgctcctttgggaggagcatgttactgatatcgcacgcgccatggccagcactattaaccaacgtctcggcggtaaaagaagtaaccgagccatcctcatccgagacagcggtaatcttatacccgccgcggccgccgtcgatagcctccacacctgtcacgcgtgtcttgaacgcaacatcgcctccgcggtcctcaaagtcgccatgcaggtaagtcatcagagagtgactgtccacaatgccagatgtctcactctcgacgatgcctgcgtctgccttgacgtctggttcgcgctgctgcgcttcgtcacgtcccactagccgcgttggtgcgtcgcctagtccttgtgcgtgcgcgtgcaatttcagacaggcttcccactgagtagggttttgcgccacgatccatttctttgtgttgcgatgggggatattgttctgtgcgcagaggtcgtagaggaggttgcggccgcggatgcagagctgagttttgagggaggtcgctgggtaatagaggcctgcgtgaattacctagttggcgaggggttgctgttagtttgtttgggttgtgttggtttattggaaactgttcaggtgggctcattgtggagattgcatacctcggagttgcgactgctcgtctctgtccctggtgcgtcatgtcgctctagtagaatggttgaggtgccttcgcgagctgcaagttgccgtgcggccgcgaggccgacgacgcctgcgccaattacctttcaatcagattagccttgtgtctgtcttggatctacctaggttgcactataccgcatgggtgaagtccgcattggtgggtcgggtgctggaaaagcagcgagtggggagcttatttataagcttaaattgctgcttaagcagggcacgtgcagacatatcgggagggcgcaattgaccagcagcctgcaaggaaggagccctgaagtgtgactttggtaggaacatccgacctccgacctcgggaatgacctcgggaatgacatcgggcgtgatcccgaggcccatatattggaactcaaaagtatgcgaccctggaactataggaatatcaaaccatagattctcatctttcatcatttgacatctaagaagaagaaaggcaagtccgaatgaaaatgaccgctagtttctgactatacatagacaaagggggcaaagggaaaccccttatgaaagaagagtgaagacaattgtttcagtttctaacaaagactcgacatgaactggagttactatttaactgaccataaatcccatcaattaacctgaccatatcatagtgagcacatctcgagtcatctcaagctcatctaaatccacacttctcacctgaacgaagatgatccaaccaggtatgttctcccgccccgatggctccaacatcgcagagatcgacacgaaggagtttgtccactgggtgacggtagacttcagcaaatttggcggacgaactaggcccaatagcggcgagagcatgatgcgtctgatggctgagcagtgcagatctggagtagccactattacatccgtgcctcagcatcatattcggccatgctgtctctcattgcccgtcgtcggaaatgccgagctcgtacatgttcatattctgtggcgtgcagctgagcttgctgattggcattgggaggagattatggccggtaaggagacgcttgatactaagcgcgttctaggcgatgctccacggttgtctcgtaaaagggtgaatggggcttaatattacctcgatagatgtagtttatttcgaccgatcgatcatagggctatattctgacagaagataatgctgtcaattgagttgtttatcatcaactcaaattcattaataagtgatggtatgataccatatagaatttaaagaagaatgttttatcttcaattcgcataatgctgtgaggtagccacatgcttattcgacgtccatgagaacatcactcattatgtataaaatatacgagaactttttgacgctccacttcccagagtccttgagaagagatgcataatcaagcaggattcgacgcgcaaactgatacccaccgtggaacggcagtcctcgcaagtagatagtagccccgttgcgaatgaagttaacagcgggatcatccgtcggcgcgagagcctgacttcccctaggctccatgaaactagtgaatccctccgttcccactgatctccagtcgacatcatccatcaactccacagacccgacactagacggcgaactagtagaggccggaaccatgaacgtatacagaccgagcactaatccagccgagaagagcgaaaacatagattggaaggtgggatggtcagaagctttgcggtttgtcatgactttgtagatttgtgcagcgtgcaaacacgcgcgtctggcggcaggtgtctgcgaccattcacggatatcgtcaagcgccttacgggcaggatttgggcctgcacggccagctgcaaggtcgaatatttggatatcggcggtgagagtcatgcaaatgttgtgccacgtaatgagagcgttaggattgaggcgatcgagggtttcgctgtagtttgtgatgagctgggattggagggaggggaggcacctggctcggccgtccatggcgtaggtgtgacatggagcaaaggggtagctggctctattggagaggaggcggtggtaggcttctgactggcggagctgaactattgctagtattgcttgtatacagaagtcatctgcgggagcttctagggtggggatgttgatgttttcggatggggcgaggatcgttgatgagagaatgcgctttccgccacggattaggtgtttccattggatggaggagctggcgctgaagagagcttcgctgcaggggaggatgagttggattgagtctgggactgtgattggacccgttgagaggaacgaggagtaccaagagtctaggagcagtaatccaatgattattcttgggaagactattagtgatgtgcgatataagtaggaattttggcatacctcttagttgattcgaccttgctccaggctttccatctcatttcattatcaggaaccgtttcgaacaaagtcatgtcaagaatctgtccttcagtggctgaaaacagaccatgtctttgggcgacctgcataattgtcattagagtcacatcgatagaggaaaacaagaaggttctcttccaactcacagacatgacattgatataaagaggttgacactgttctagatgtactttttcctgcaggatgacaatgattagtacctcgagttcagcaaacttgggctaaggaattcataccccggtcaagccagctaggtttaataagagcaaaactgtcgcaaacaatgtcacggtgccagaagcgctctcaagtcccattgagcatcgggcaaattcagctgttaccttttccaaagtgccctaatgactgtcagtaagctacctgcatatatgacgcgattaacaatagttgacctactgagaaatttctggacacaaacgcagttgttcctttcgtgccaagtaatgtcatgccaaccagcgtcataacatatagtagagatggtcgcaccttatttgccgaaaaggttggtagatggacaaatggcaagaggggattaaagatacggaaaaataaatctagtgccatatccaaaatctcagcaggagggaaatcagagtaattcaatgtcgagacaggcgtggctggaggaatattcctatctgggggtgactgcatatgcgcagaaagagtcatcggtccaaaagccgcataaaggcgccgtctgcaattctcgtcgaatccataccgggatccttcaacagcacttgcctcattgggagggtgtaatgactgaacggagaaaatattatcaaccggcgacatgacgatatcccgccataaactgttaataagacgcccggtattcggtggtgctagccagcactgctgaactctagcgaagcgttcattaggaatgctatcgctgctgtcgactgaatgtcgattctgctggcctgaagtaagattcaaattgtcaccgatcagtggaaaatggctatcgcgcatcagatctagcgagtcaattgaagccgaagctgtgcgtggttcaagccacatttgtagcatgtcttttggcccagggtcgaaggccgagccagctcggtgcgacacatgatctgccgatgtgactgcattccatccaaagtactgctgctggtcatcgatcatcatcatattgagatctggctcggtgcggccatggtgggctgaaatgtcagctaggtaatctagtgatgatgggagcccagttgatgcgagatgcgcatctcgcgaagtggtagacagaggtggaatctgtgcttctgcgccgataaaaccatttcctggtcccgggatcaatgatgcatccgcaattactgatgactgtcgatttgacgcttccgatggaccggctgtcgcattggcttgattgtggcccttggcatgtcggctcaagacatcgctgtatgctcattaaatttaggtatttgaacataggattttgaatatgttacaattcacatgtgccttcaatggaatttaccttcgagagaaacgcttgtggcagacattgcattcgtatgggcgttccttagtgtctgttttgtatgttagattgctcttgcaggggttcgacgtaactgacgcgaccgctcatgcctcttataatgttcggtttttttgaacacccgcgaacagatggaacattttttcaacaccatcacggcgctctcgaaaagatgaatgattacggtacatgtaaccctcaagacttgcggaggggaaaatatattagtcagcaagtccggggttctaaccttggttgactccactgggactattccgcattgggaaagttgataccttagaaagcaggcacaaataatgcgatttatctgaaataaatatattctaacattgcaggcctatctagtctcattttcagattctgggatacctgcatttgcaacaaaggaatagagatcttcatccccatccgacggaagctgaccactgagcatgagcatccagcccaacccagactcgagttggaaatcgcgcgtctcaggctgtgtgcttaaagaccttccattattcgggattatggagtcggatccattaagtgttcgtgatcgctttctgggggggtaactagccccatcgggtccacggtccggcttagtagcacgggtacgaatctcccatttgtgctgtagccttaccagaaggtctttagcacgattggcactttgccaggatagagagaactcatcaagggccctgaagcaggtactcagatgagcgatgatattctcgttttcttcagtttggtactgggaaacggcagcgaagagaagtagtagcacggcggaggatgtaattgagactgctttaatgtttatgcggcggagggtatatctggtctcgtacaatacaaggattttggcaatggagatggcggaattaatgcacatttctcgagcgtgagtgaacccaggtcccttcggaggttgtggttgcaggtagccttttgacatccagggtcgatgactgtagatgagattctggtaatattgcatgctttggggtaaattagcttacgttgtttattagaactttgaatggtataatagaaactcactgaagtagcaacacatgtggaagataaggagaactgtgatcgttaaggtcgatctgtaaaactgaaggcaactgagctttccaactgagaagcttggcaacattatttgcattgagctgttgaagcaaggctcttggaatacctgacgttccatacctgtttcgaggccaaagttagctaaagcaactcacttgagcccaactatatgatgtcgagcgacagcggcaaacagggacggaaacctacagaaaatagccgcagggtgccataagttcacatagggagacttcctgttcactgacagcccccacacagtcaaataacccggaatcattgtcaaatgggatgggagatgcgtagggcgtccatttgcaaggttctcgatagtcgacgtcattattgggttttttgactgtaacatcctccatgttggtgtagaaaggtctaccaaggtagaatccgaccaggctggaatttcgaaaagttaatgatatccttagcgtgtacaaaagcagaatgggaactcactggtctaccatatacgcagcccaaaaaacggttcgacgcagctcggcgtctgcagcggtaacagatccacgagcaacataggaagaaaggtcgatatgcaaggcaagatcaaaagcaagccgaagggccattcctagaattgtaagctaagaaaaccaagaaatttcgacagaactgaccactgtagagccatccacgtgtatctgagcctataccgatttcatggctgctcaagatgactagtgcttggactgttgccacgcatggagagtctaattcaatttcaagcagttcttttgcacggtccccgaagaattcaccgagagactttgggaacgtcacaaaggatggatgataacgggtctcaaaagcagcgccgagagaacacctattttctaatgtcatttcacctttccatttggtcggcaaaaaaatgactcacattgcatagcagagtgcctcggaatagaacggggtctcttctttcccatcccacgcagtctttcccttttcgaacaattctcggtcgacgacgtggaacgaaggatcttgccaggcaaaatagagattaagaagatgctcctcgagagataatgggacttgtctatcatattctgcgtcatcgaaatgatcgacgatacgatgtgtctgagtgttgatagatactggagcatcggcaaggttgaaagtcgatgtcgggccatagaagcgagctcttcctccaggaccaaagcgcaatgtgcccatccgatcagaaatctcgtcgataagatcttcaatttcttccgtgctcctggaatcattgtcgaggctgggtgggctttgaatgacggcggactcaaagggctcaggtaccctatccaatggtttccctggcggctgtagtggttctacgccaatgtctccgatgtctggagatgggggcgtaatgcatgtctcaaagtccaaggtccagtcccaattggccaataaattatcagagtgatcatcagttggtggatactgttctgcaatggagatcccagtgtcaaggaccatgggcagtgtcgaaatggcgtgagggtccgaaagcattgtaaaactcgaccgagaattttgcgatgcgttgtccggtgatctcgaggtctgagcccaagtatttagatcattttctacaccaggagctgagaacggcatagaattcggtgcctcagaaggcagatcatcgcttgcagatggggagtttggattgggggatttgctgttagttcgattgtatcttgcggctgaatgaacttcagttaagccaagaacatcaaggactttagccaaagcagtgtccttttcttgtggcatgggcggggcctccaatccactttcgtggatgaagagacagagctgttcaactctgcttgatagaagctctatggcaacgcggagtgggagtcttcacatccataatcagcactattacctagccagcagccttcctttaatgaaatgacttttgatgcgtcacttactttctcttgtctacggcctggtatcgacattcgcggtgcttgttcatgcagctggagcattggggcttaccgccgtcacactttgctgacattagcttcattttgtttcccaccgaggtaattgatagtcaccttgaccttactttcccgacatgacacgcatgccatggaggcatggtgcctcctctttggggggacactgggctttggcatgtttttttctggatgccatgagactatgcgcttgcaatatcctcgtcccttagcaaatagagggcggcttaacctcgggagggatagtgcggggtaatactaaaggggaaatgtttgatccgaactatacgtcgtagcttctcgctgctatttcattggctctaccaaaagggggaccactatcgacccgtgtatttgtatttctggggcctcaagtgggggatactcgtataagtaaaggatgaatgacatcatgcatgatcgacagcctcgttggcgaacgagatgtcgtgcaaatgtcgtttctttttccggggaccaatcgctggtaaaaccggggctggctctaacctaatccggaatagaccgcctctacgggaatcataacccggtgtgggggaccccacgttttctgtaacaccccaggttttcagatgattagtaggattaccgtgtagtcctatcacataatttagatttcattgaatataaatacagatatgaaccgcacacgagtggtccatgctaagatcgtatactggcgatattgcaaccctgctcatcatgtttttccagaatgcacaagggaaatggcttcaatacagaatcactgcagcctgcggtgccggtttcctcctctttggctatgaccagggagtcttcggcgggcttctggacaatgagccgttcctcgagacctttggaaatccgggcgtgaccatccaaggtcaaattgttgcgacttatgacattggctgcataataggcactctggtgacgatgttcgctggagacaaactcggacgaagacggacaattctgatcgggtgctgcatcctgatcgtcggcgctattctccaaactgcatcctattcccttgcgcagatgattgtcggtcgtgtcgttgcgggagttggaaatggaatgaacacaattgctattcctatttggcaatcagaaactgcacgggcagagcaccgtggaaaactcatcgttgcacagttggtaacgaatattttcggcatcgtcatcacaaatgtaagctacttcgttcacagtacaagaccttggagcaatgctgatttttttccctatcgcagtggatgaactacggattcactttcattcctcactctgccgtgagctggcgattccctctgggcttccaatgtttcttcgcgcttgtcactctcgcttttgttattgtcgccccggagtcaccgcgttggctggtcatgaaacaccgtggcagcgaagcccgtgaaatcctagcacggctccttgcaaagccaattgacgaccaggaagtggtggatgagatacaaaatttggaaatagccgtgaaccatgaaaccgaagtccaacaatcgaagcctttgcaggcaatcttcaagcgcaataacaagcaacagacattgcgcaggattcttcttggagctggtactgccttttttcaacaagttggtggaacgaacgtcattgcatactatctaccagtggttctgacccgatcagttgggttggacaacagaatggccctgatcttgtcggccgttgactctatgtcgctaatgttttggggatgtattgcagccctgctcattgaccgcattggccgaaagagattgatgctcttcggtgccgctggtagcagcgtctgctttgcgcttgttgccgttggactgcggtatggtggacccgacaacaagggtatgtctgttctagccgtggtgttcatcttcgtctactacgtcttctacggcatgtcgctcttatcgatcccgtatatctatccggcagagatcaactcccagcaaatgcgcaatattggcacttcatttgcgaccactaccaactggttattcgtttatgttatcgttgttgccaccccaacagccatcgcaaacatccagtggaagtattatatgctttttgccatattcaacttctgtttcctgccaatcatctggcacttctatgttgagaccgccaacctgtctcttgagcagattgacagactctttgagattaaacatgaggctgggaaagcaattagctggtcggaggcaaccatgatagcccgtacagaggtcatttccgatttggcacacaccgaaaaggaaaatcttgatgctgagcactatgagattgcggcttgatcttggaataggtttctttagatgttgtacatgtgtataaatgatgaacagctgtcgggtatctcgaatataattatttataagctttgcggggtaacggctaatccataactcattcccgagggcttttctctgtgaagccgcttgaaaagtctacgtagcaaattcatcttcaaagcagtttgctaatttgagctacttctcaatgagattcttttcttgcgaccagggggcgtcttcgtagaaagaattccactagaccaaaaaaccatgatctctatttatggcctaaaggagggctataattgttctgtttcttgtcaatatgcctatcttgacattggcgtttctgaggtaaccaaaaaagtttagtgacacgataatgcaattgcagtaatagtctcggttatagcaagtcccagttcaactcggattccctttcccggccaagccttgtatccactccaaactacgattgtgtatataaccccgactaagctgttgtcgaagcgactactggaaagcatttctcagattcttcaactcttactactccttcaaatatcccctcgtctcaagatgtcagccccgaagttgcgcgtcggtatcgccggcctcggccgaatgggtaagcattgttccccaatcggatttcgaaaacctccaattgacacataacaggccaacgacatgcattgaactaccacgtttttactcctcgtgccgaggtggtagcagccagctctcctgatctcaatgagcacgtatgggcaaaagaaaacctcacaggagcaaaaatctatacagactactatgaaatgctcgagaaagagaatttggatgctgtagtggttgctggaattactgccgtccacgcagatcacgccattgccgctatcaagaagggattgcatgtcatgtgcgagaagcctttgtctcttgacgtcaagattgtaggtcgttctatataagctccctatatgaagacatatgctaaccgcaacaggctcaatccgttctcgatgcctacaacacatcgctcaagacacaccccaaccagaaagtcatgtgcggtttctcgcgccgctttgatgcttcctaccgtgaagcctatgagagaatgacctcaggccaatacggccgaccagtgatcttcagatcccagactgcagatatgctcgacacaaccgggatgttcgtgcagtacgccaagaccagcggtggaatcttcctcgactgctccatccacgatattgacctgatgttgtggttccttggtgagaccacccatctcaaaagtctgcaagcggttggagtcattgccgtccacactgcattggatgcgagcaaggaccgtgacaatgcggtagctacggtcgagtttgacggtggcaaaattgccacccttttctgttcgcgtatgatggctgctggacaggaagataccaccgaggtcatttgtgagaagggctcattgagagtgaacatgcaaggccggaagaaccaccttgagatccacgatggtcagggagctagacgtgatcttcccaagcattactatgagcgtttcagagaggccttcctcacggaagctaatgagttcactgctagctgcttggataacacgcctcctccagtgtccctctcaagctcggtgaaggcagttgttattggcgcggctttgcagaagagcttggttaccggtgaaaagattttttttgaatctgggaaagaggctagactttagtgtaggaagaagctgtccaaaattcaaataggtattcattcaatagacaagtgcttttccgattctgtacattctggacttgtttgtttgtatatgtctcacttcgcgtcacacatgccaccactacattatctacacacgtacatactgatgccagctctgttttttgtgtgatatttgctcgtctatataccatgtgccaaacttgcttgatatcagtcaatttatggagctccatattctgattcttaagcggagatttgtgtacaataacatacaaacaagacagtcaccgtacagatctcatgaacttatagaccattaattcacttagaagtgccaaagtattgatcaagtctagagatactataagatcaaagggtagatatagtcatggctaataaataatcctatatgttgaacgatagcatcaaaataatacccccccaggtggctgtggccctgtggcgtgcacggggcaccgttatctggggggggggggggggggggggnnnnnnnnnnnnnnnnnnnnnnnnnnnnnnnnnnnnnnnnnnnnnnnnnnnnnnnnnnnnnnncgtgggggggggggggggggggggggggggggggggggggggggaaggatgcagcgtcaagctgccccaacgtctgagccataaaatgctcgtcggtcgaccctccctctcatcaaattggaggttgactttcttttccatctaagacctccccgacaagagggcaatgaatctttctttcttcttccacccatggaattctacttctttttttttcaaattccaaacccatggaagctttgatggcagactaatctgccagcgtgattgcaatgatatctctcttcaacacttattcttcttctgccttcttctatagtgtgctcgctgcctcacggggatttttctttgcatctttcccccgtccacctgtgccgtgagcagacaatctccagtatatcagattcagacaaaggtacggaccctaagcctaatatgtcatcttattagttgactacagcctacgattgaattaagattaatttacttcgacgaaacgagcttctatactccggaacaacgggaaatcaatgttcaagtggtaaatgagaccaatgaagtgatctcgacattgattcagtctgaattcgaccaactgattgatgaaatcgaggttgctgaagaagtcgacatacttgatggaacgcatgacgaccaaatggaagaccaattgatgcccgaggcagaagcaacagaaacagacgaaatccttggcgatcagccagcaacaccagacgaaagcgaaccagacgaaatcctcggagaccagcccattacgccgtcagaaaccattgacgatcaaccacgtgacgacggtctcatggtattcattgacaatttcaacgtcaatggagatgattacatctctctctaaaacgaccattctcacccaatgatgacgacgaagaatcacctgacaagaaacatcggacgaaccttattctcacctatttacgcgccttttcaacggcatgactctctcaaccaaagaagacaccggttgatagtttgccaaaagaaccagacaactggtcagaagcgcaattccatgcccataaagctgaatggcaccatgcaatgcaggttgaatatgacaagctgaatgagatgaatgcttggatgtctgagaaactgatcaaatgagattggcatttagaccaatgttggaccaatgtggaaaaataccccagaatgcctgccctaggcatcaaattcttccaatccgatgggtattcaaatacaaatcagacgaaaacggctttttgacaagtttcgaagcacgcatttgcgttcgtggcaaccttcagatcattgaagacaaagaagaggttagggctgttggagtgtggcagaactaggcacgatgcttcgtaatgcactctcgatgggtcaaatgcgtagtgtttaaacagataaacagctaggcggtctagtgtcaggtcaaagatgagatcaaagtgtatgttctgggatgaaatagtcaatttgtctaactaatattcaatacaatttgggctttcttataggagtcaaacattccagatagctcagcaatttaaagatcagataattcatgactctcttcagatgtaacaaagcaagacgggatggaacaaaggaagcaatcaatggcatcactaaaacaaggaacacatatattctgacacaccccttcagattttgaccttagtcaaaagctgtacacatgggataaaataagaaaggagagagaagggatcaaacattgtcgaattcggttacccgattaggcaattgtctcaaattcagttggttcaagaattcaaggtatttttgagacgaaaggtgttttgtcaatccgtcggcgatcatattgtttatggcaatccattggagatatatatctccatttcttaccttttcacgcagccagtgcttagttattgatgtgcacgtgatgtaatttcgtctgatatgacgaatttgacttcgttatcagatcaatggtctgtttattatcatatgataagatcagatcgtgttcagtgtcaaactcaatggaatggagcaatcgtttcatccaaagtaggtattttgctgcttcagagagtgcaactaattctgcttcggttgtcgatgtggtaacaatccgttgttttctcgctgaccaatcaattggaccactaaaaagggtgaaaatgaagccttgagagctttttcgtccgatgttatcagcaaagcttgcatctgaagctgctcggaacacattgaggatcacatgatccgtcgaattcaattgaatggtatctggtcccatacaggtatgagattgtttgctctgcagcgatcacgtgggcccttctttctggcttagtcaaccattgagaaagcattgatgtgcaaaggcaatgtcgggacgtgggttgatctcgcgggctataggttgatttagggtatttcaagcgataaggaatagcttgaagcaagaagcctgcttctgttttctgtttcctcaccacagaaaatggcgctgaaactcaaatgaaggggcttcctgccaagagctcagtctctccactggagcactctctttatgtgacgacccagggaccggatggttcggtgtctcactggaagtcccatcgacctttcgagttgtaggagatattggaaccgaaccatggagcctgtcattctgtgaacgctttttcttctccgaacccaccatttcaggctcagtgcaagctttctgccacctccggataccgtgagaagtatcaagagggaattgcgaccaagtatcaatcccccccttctcaagtctgggaaatggcacatacgtgccagcagcgtggcctcggctgctctctcggggaggaatcgcagccgatagctgctcatcagagacatgcggaagcaaattcaaaagaatgctctcagtgagctggagtcgattctccagtgcttcggtataccctttctctggtcctcttcgaagctgttcgggccagttgcacggtcggttgttctcaagacattgttcgcaaacgggtttgaggccgctgcacttttgctttctcgagcgacacgagttgcaagcagttgtgatacgtgctggtcttttctcttttgattttgatgccatcttattttcttcttgtggcaggtcaagaggtatgaggggagtggggtacacgcagcggtaaacggcagaccccatcgcctgaaagttctaccgaacgtcccggtttgtcgctacagcggccatccggcgaaaaggcaggatgaactatcagccacctttaatcgccgtgttttatatatagtctggacatccatctgcattcaatttactcattacatcttccccagttccatgcatatttcctctttcaatatggcaccaaagaattcataccgcattgcctctatcccaggcgatggcattggtctcgaggtagtcagtgctacaatccaggtcgtcgagaaactcgcaaagatccttggcacattcaagatcgactttgagcatatcccgtggggaaccgagtactacaagcaaaccggacgatatgtgtctgaagattaccttgacaccatacgccagtacgatgcggtattattcggtgccgttggatcacccggtatgttttctatattgcatagcatcatgccgactaccaagcaaaaatattaacacaaacagacgtgcccgatcacatctcgctctggggcctactcctggccctccgcggcccactccagctatacgccaacgtacgaccagttcgaactttccctggaaccaaatgccctctcaacaccgcaaccgaaggcatcgactggatgctcgtacgggaaaactccgaaggcgagtatgccgggcaaggcggacggtctcacgttggacagcaatgggaagtcgcgacggaagtggcaatattcacgcgcgtgggaatcgagcgaattatgcgattcgcatttgagacagcgcagtcgcggccgcgtaagcttctgaccgttgtcacaaaaagcaactcgatgcgcaacgggatggttctgtgggatgaaattgcggaattggttgcgaaggacttccccgatgtgacctgggataagatgcttgttgatgcgatgactgttcgtatggtggcgaagccgcagtcaatcgatacgattgtcgggacgaacttgcatatggatattttgtctgatcttgctgctgcattggcgggatctatcggtgttgcgccttccagtaacttggatcctacacgcaagaatccgtcgatttttgagcctgtccatggtagtgcttttgatattactgggaaaggggttgcgaatcccgttgctaccttttggtcggcggcggagatgcttgtctggattggtgagaaggatgctgctgcccagctgatgggttgtgtggagcgtgtctgtgctgcagggattctgactcctgatctggggggaacatctaacactcaagggattgtggatgctgtttgcctggagattgagaagttgtgaaagaagatctgagacaattcattgtctttccttcgttcttttcttcttatctttgtttctcaatgtcttcgtctcaggtcatctgaaatatgactttggatgaactaatcagtcggccctgcattgaatatcgatagacacaaaataccaaatgatgaatacagaaactgatttataggacaccttaagtagtgagcaacgcgtcttccagaattgtccagaaatatcagttatctgtcaaatatgtatgaatatcataaagaaaatgtcaaaggcatctcacacaagacggaacagatcagcaggcgatgaactaagaaatccggaaatgtcattatagcaatatgacactgttttcctcatataaaaggaatggtaacaatatcagtatgctgttgtcttaagagtccaacatttaaacgggcttcagcacccttcatagtccttcagaaagcactcagacgggccttcaaacaagccaaagccccccgaatccatctatctcattgatcatcaaaagcaagatttgtcccctccaactacaaacctaccaaccaactaataatatccaagggatgttctaccaaaacggaagattaatccaagagctcgaatacaatccccgaggaacgaactgggtgaacatattcttcaatgcccgcgactacagatgcgatgaccttgccataatgcgcacagtcgtcacttgcatccgcacaagagtcgtcagcatcactggccatgctatgcaccacgatatcccactctgcatctcgatccaagttcccggggaacatggtgacaaggagtcgattcttgctactgcagagctattggcggaatatcttcggggacaggttgctaggggctctgttaatattaatcggtctttgctctttcggaggaggtagtgtttggtctttgggaaaagggaattttgatgcttgaagtggttagagcttgtttggaccggctatttgatagaatgggaagttggatcatcctgaattgtccactatgttgtcaagtatctatactgtagtaattcagctggtaacttgtataggtagtcccggggtcatgcatgcacacgagccttgatatctatatctatagtcaggttaaagcactaaacggtttgggattcagagacattatgcatgatgttaagtggcataccaaagacataaaaatacagacgcacaaagatatcggggaatagatgaaaggcttgaaaatgacattgtatcatgactcctttgttcttgcctagatagactcctgactataaacaataaagaaaagagctactaggcagagaaagtatttaaacacaacaggaagggactcgaaacctccttcttatctttcctcccttccctcttaccacttcacagcaaataaccacaaggtaagcaccccccaaatccaaaacatggccatcctcaattctaacctcacaaagatgcagagcatgttctacttcgacggggagctaatcccagagcccgagtacgatccacgccaggtcagcaactgggtgaacgtcttcatcaaggcgcgggattccaactccgacgacgagactctaatgcgcaccgtcgtcgcctatatccgaacaagcaccgcttcgatttccgtccatgccaagcatcatgactacccactgtgcgtctctatcaaggtgcccggagactaccattccaacaaggcgtctattctcgccgcggcggagctgcaggctgactactattgccaggagattcggaatgggagagtgcgcatcaaccgggctttgcttttccggcgtggggtacaagaccggcgccggggttgatggtgcagatggctggtttatggcccgaatgagaggctatcaatacatgagcgtttgagagaaatacccacagcgtaaacaatatgcattattttggttggtcttctttgatatcattgtagattattttctgttttttctgagttgtgggtgatagcatggtcttagaagcttgggaattgctgtccgatcatatcgaacagagtgtcaaagttagcgccctcgattaaatccaccatgttcaagtcgaaattagatgaccccttgagctgtgccggatctgtgtcctgtaaatccatttgcgttgaagaggatgtatcggtgaggatgccctgctcgttcatttgtgacgggtacattgacgtcgaaggaactactgtaggatcatgtcctctgtgcatggattccacccatgtgttattccgtgactcaagctcggacgcccctgcgaataagccaggctcttcatgcaagtgcgacagacgaccaagtctctgtctgttctcctcccgtgcggttgaatattccacatgtgtgggacttccctcggagcctctcatcacatatgcttgtgattttgctgttttatcggatccgctttctgactgttggatttttgcagccagcactgaaagcgacatgtggcagtgtttggctgtctcccattgagtagacatcaaacgcaagaatcccgaaaattcatcaatttccctatcaagcagttagtacacacacgtagtgatcagttcgaaacctagcagaggaaaaagaaacaccccacgtactgaagaccctttgtcaacacatattggttcagttggcaagctaaagccaacactaacccagacatccacgcagccgacaaaaaaccaggccagaataaagcctggtggctatcaacttgcaacctcagccccgaaaggatagcccgggcagccccgatgcaggtttgcaatccagaacagaattcggcagttgacggatctagggacagcgaaggtcgatggataatcagaatgagatgctgatacagcacagtgaaaaaaggagcaaaatcaaacgcactgtctggcaatacagacctcaccacttgttcagataccactggcttgatttggagattggtgggaaggcaattccaccacttatgcacgtctgtcacgaggaacaacaccgagctgcgacgaacagatcgaaccaatattgatttgtggaagagctccaatgcccgacccgtcagggtccccgagtcaacgtagctagcaagaacactttccttgctgtagtcttctttattgccgtgctgcggcgcagagctaccattcgcagagtggccccggggggaatgcaattctcgggcggcaggcagacatacatcgatatcggaatcttgtataccaagcggcaagcccaaagcctggctcaggtatctatctatcgcataagcacaccaaaagacccgcttccgcaattgtcggtcgtgggtggagagttgcttgtatcgaaatggacaccggtggagacccgcatgaagcatcgagcgtaggatacagcctccgacagtcgatgctggtcgaagtgacatggtcgcaacgagatatacttggatagctagaagcgcttgcagggatacgatatcatgtcgagatgagagagtcccaagcaaagagttgaaactggccggtgattggatcttcgattctgactgtagatctaagtcgggcgctagaaaaatgcctagattgaagacacattggaaaatgattgtccagcacgtactccgatggtctgcacagggttcctgcgtgtgctgagcttgattcccattggagtaaacgttctccattgcctgcaggaaggtaggaccatgcagaaacgggaacagtgggtgccagactttgaaatacatcatcatcaggcccctagccacatctgggggtggtagattccccagagatgccgtcaatgatcggtcgtaggtccattttggggaagattcgatcacccgcaaggacgaagcagtgtctctgacatatgaagtgcgctggcgcttgtcacgaggtgagccttcggcgcctacgagcgtttcctctgctgtggggagattggattcaggtgaccccgggccatctaagccgttgaatgcacgttttactgtcttgatgaaatagacgccgcttgagctaccgacgaactggctatcctcattcgagtgtgccgtcaaagaaccaatttcagatgtctcgggtacaaattccgatgccattgtgcatataccatctcgtgagtatgagatgttctctttaaagctcgatgtgtttcgacagaatcatcacggtcccggagtgatggagacatgctgagtcatcgtacgagacggacaataactagcggtctcgggaaataaagaaaacatccgtctacggtcgaaaggaacttggtgaagcaaaataagtcactgccatcccattgattgtctggcgctgctctccggaatccgataacaagggagaccaggcttttccgtgaggaatttaaatctatctgacagaacacaggcggtagggagaagtgcggaaagatgataacctcacaaatcctccggaaaaagggaaaaagaaaaaaaaaaaaaaaaaaaaacaaaaaagaccttggtgaagcaaaataagtcactgccatcccattgattgtctggcgctgctctccggaatccgataacaagggagaccaggcttttccgtgaggaatttaaatctatctgacagaacacaggcggtagggagaagtgcggaaagatgataacctcacaaatcctccggaaaaagggaaaaaaaaaaaaaaaaaaaaaaaaaacataaacgacgacggcgaaaaggttgactgtcaaaggaaccacacccagcgcctagaataaaagacttttaccaatgccaaccaggagacaactcgatatagcccagtccaagtggaaggtaagggaaatagcgcatactagggaaaccggagaagagagaagaaaaaaatccgaatgtcataccgcattcactaaacaccaggaaggtgactgcctaagaacaaacttttcgaaccgagggatatcaggatcagagatggggagatgtaggggtagaaagggtaaaagatgggaacaaataatgataagagaaatgaaaagtcgtcaaaaacgtgcgtccaagatttccgagaagacaaagagtgaacacatcaattaagacttgttctcctcaacaggggcctccttggcggcttcctggggcttgggttcggtggtctcgccatcacccttgttcttcatgtactcatcatagacgttaagggcctcatcgaccttgccgcggagagcctcctcatcatcgagcctggaagaatgttagtaaatcttgtcacacataactcaaaaaaatgggcagtgtaacttacaggccaagcaactcagcgttatccatctcaagaagcataccagtgatcttgccagcaagctcgggctgctgagcctggatcttggggtaaagagcctcgccgagcatctgcttctgctgagcggggggagcggtgagaagagcctggttggcagaggcgggctcgccaccagcgggctgaccaccaggggcgggctggccgcgaccaccaccacgacccatctgaggaccaccacggccgaaaccggggccaccacgcatgttcatgggcataccgggaacaccacggccaccgccgccacgtccgaaagcctggggcatagggtagcccatgccgttaggaatgccaccaggggcctgcatgcccataggcataccctggaagttgggaggaagctgttggttggggggcataccacgaccaccttgggggaagggaccggggtactggggacgtccagcgggcatgttaggcatgggcataccgccctggggggcgaatggcataccaccacgctgtccagggggcatgaagccctgctggccagcaccgtagaagacggcgggctgcatgaactagtcaagttagtaattgagcgggctgaacaggaaagttgcaacttacaggctggggcataccggcagcggctgcggcctgctgctggcggatagtgttgcgagcctggatgctagcctcgagctggctgcggcggacatccttgcgctgagcgagagcaacgtagaggggcttggcgttgaccatacgctggttcatctcggtgacagccttggaagcctcatcggggctgctgaagcagacgaaaccgaagcccttgctcttaccgaaggccttcttctctgtcttcttctcctcggtgtcctcgccctcctcctcggtcttcttctcctcggtaggctcctcagtcttcgcctcggtgctctcctcggtcttcacctccttctcctcggagtccttggtctccttgtcggcctccttctcctcggcctcgggggagggagaacgttcggcggcatcacgcataaccttggcggaagtgatagtaccgtaaggagtgaagaggtcacggagcttctcatcatcaatgtcgtcggtcaagttcttaacgtagaggttgacaccctggtacttggaggccttctccatgcgggcagcctcgtactgcttgcgcagctcctcctcacgctcgtgcttcttctgggcacggccaacgtaaagcttctgagtcttgacgtccttctcgttcatctcagccacagcggcctcggcgctctcgtggttggcgtagttaacaaagccgaaaccgcggctcttgccatcctggtcgtggctgagggtggcggaggtgatctcaccaaaggcctcgaacatgacgcggaactcgtcgtcggtaatctcgagatcgatgttcttgatgtagatgttggtgaagttggccttcatctcctcgaacttgctttggcggtccttcttggagatgtggtgtccgacgaagaccttcttgtcattcagcagcataccgttaacgtgcttgatggcgttgttggcggcttcggcggtctcgtagtggacgaaaccgtagcccttggagttggcgaactcatcctgggcgaccttgcagctgagaatgttgccgaaggcagcgaaggtgtcgtggagagccttgttgtcaatggcgttgtcaaggttcttgatgaacacgttgccctggccagtcttgcgcagagcggggtcacgctgggaccacatgatgcggcaaggctttcccttgatgagagtgtagttcagatcctcaagagcacgctcgccgtcagcggtgttgttgtagttgacgtaggcgtagcccaaggaccggcgggtgacggcatcacggcagacacggatagaggcgacctggccgatggaagagaatagctcgtagagcatagcctcagtcacggaggggtcaagctcgccgacgtagagggaagccgagtggggctggttgttggcagcatcaccggcggcctcggaagtggcctcgacgggggcgccattggcctcaggggtagcggcgacaacgttgtcagtgacaggagcggtggcgggggcttcagcagacatgatggcggctgttttcactaagaaaaggaaaaagttttagcatgtgcatgccgagcctatcgcagagagggggagggggaatcaaggaggcatatgagataaggttacacggcagttgatgcagtctatttagcaagcaaccaaggggcaatgagaaaaaaacgagggggtgaatcaatgaaaagggaggggcgccatacagcgaagtatccacgaaacaaagagttcagagaaatttcacttgagcagagagcactagtagcggattagcgggggaggagattcgaagtgtattgcatgcgcgatcgaaagagaagaagcagagatgacacggttttcaaccgagtaaaagagtggacaagaaccaaagtgactaaccaggtgaaaatgaagacgatggaggcgttgaaagaaaatcttccacacaacacaccgcacaatcaggaatgagataagataactggaaaaagtctttttctgggtttttcgtgtttttttgagattttgtatctttcgatttaaggattcgaaaagaaaaggaagacttttccctaaagaaagagagagcaacagagatggagggggaggttgtaagaaggaaagaaaaaaagttgagccgttcaaaagcaattggttctggaaaactcagaggctgcacgagatggggacactagtcctgtttgggaaaaggttgccgctttaagggcttattaagtataacctcggatggatattgcaagataaaagaaagaatatggccatgctatgcatgcaaaaattaatcatagacacgcggtctacccaggaaatgtacaggaaataatgactgaacaccccccttcaactcagatcaaacccagctcccgaattcacagcatataaaagcttgctcttcaatgtctctgcatcagagtaccgtggcagtttgagaagattcacacacgtactggtactcggcaatctttcctggtcctcactggagtctctaatgctaaagttgggacgaaggtggctgaatcccaacaacggagctcgaggggtagacgtcacgaaccggatgaccctttgtcgctcctcgttggtcaactcatgcataacctgccagaacagtgcaatggtcgggtgttctagatggtcatcaccaatcacatacacacctccgtagagggtattccgtcgcaagtcctccacatcaatatcagctttgtctccgctcactaaagtttgcaactcggattgattgaacatggatagccaggcgggttgaatgatctggcccagaccttgcaaaaaggcgtttgtctgtagagcaggttgcaactgtagacgataacgagccacgtaggaaatgtagaccaatctatttttgttcgtcacagcggtctgtgagccatttggtttcagttctgcggtgacagtgcggttgcctccactgggcatccgaattatactgttaatggtgaagtcgagaccgaagtcttccacgtttccgggataattcttcagttgtaactggtgaaacagattggtcagctgcaggttcaaaaaacacaatcccgaccttgccagacgataccacttaccaagccttggtataacccctcatcaaggtccttcagatcgttcaagttggcacgataggaagattccttcactgcagacctagagcctcctgtcaaggcccacttcaagagaaagaatggggcaaaattgacatcgaccaagatcccctcgtaaagacactttccaataatccggccgaggaattcatatcgtcgaagaagaccgcgcacgtcatcctgccattctgggcttgaacttgtgagcccagcctcgccgagaactgttttgagttgggcaaccgctgtcgggctgggatacagcagatggtgatcattttccgcaaacatgctttcgtggtcatcagttttgaaagcttgggtagtgatactggttaggaactccttcgtcacaccgccaccatcgatgccggcttccattgctccaaactggtcgataaaactgatctggattggctctttgagaccgtcacccaagccatagtattgagagaatgcatcttcaaatacactctcacgccggatgtcagcatggtgtcgagccaagatatccgccgcaccctcaggaggtccatttatcatagcgttttgggccacagacaaacgccaggactcagcatccacgaagcctttccggcgacgctgttgatccctaaatatgaattgacggaagatctgcactctcgtggcaaatggtatgaagaaaggcatatttcgaagtatttctagccgtggcgcaatggcggctagagcattattatgagcttgtcttctttggctatttcgcatggcttggagatgaattagtcgtcgcgcatggctattgccgacaaggtgaggagactctgggtattcctcatcaagaagatcaggctcagaatcttcatcttcgtcctggaattcatggcgtttctcctcttctgccacaacagctggaataaagccttccatgtcgaatcgatctgtcatcaaccaatgattttgtggaaggaatttgcgtcgagaactagaagcgtgtcagctagtgtgactaaatcatagcaaatggaacgtttcaactcactctcgctcatgtagcattctgagcaaacctgtaaccaagcctttgaagtagtcaagtgggatacctgtcacaccaggaagatcattgatttccttcttggcctccacctcagaacgctctatcgtcccagaaacctgagccgtgttgttgaaataacttctaagatccacagcggatgatggaacgggccctttcttggtcaagtcggcaacattccagtagagggtgaaggcgaggtttttgagaaagacggtcatatccttaatgtctttaagtggcagtgcgctctctttcgtccacgaagacaagacatttggtgaagctgtaaacggtgacgcgcttgagaagaactcttcgtcatccatgactttcaagaggaacgtgtaaagctcaaaaaagagcagaataatcgtccactcctgttcttgatcctctctatccccatcttgaggcagttgcagtaatggaagaacttgggtcgagtccttgctgattatgtcaaagatccggctggattttgatgcctgccagaaatatttgatcgccggtattttcacacctggctggccagaagtgggacctgccgaaggcgccgagcccaggtacaaccacattcgaatgtcgtctccacggcgagggaacaccctcagcaaattcagggcataggtagcaagaatcttggcttctctcgaagcgttgggttcgttgtttggtaagtctgtgtaagaaagttgggacttttcgatgcgagaaagtagccccgtaatgctactttggttgaccaagctactgacttgatctccgatgaactgatccaaataaggacccctgattggatccgagccgttctcgtccgcctccaagcaccgtgtcagatagatagatgttgagttgagcaacccagagaccacattcaggaattcgagatcaggtgtttgcaagttggcctgccctggaagagcatatcggtgaaagaaaatcaagtacgcaagcagccaaaggcgactctcgataccctcgacatcgtcggcagaaaggcgttctttggtcaaagaaatacatgattcgattgcaggtgccagtaatttgtagttgatttgatgcgccagtccattaagctcaccgagataagtgggcaggttcggaatagtgagatacgacatagcaagagcttcatatgctgtcatcgtttctggggttattggtctcagaagagccaggacagcattcgtgacatgctcgggtgacagggtaccttccaagatcttaatgttctttgtcaagaaggccatcgtttgatagtattgtttggcaattgttgccatcctccttggtatcaagtcaatgaggaagactatcgtccgaaggaggggcaggactgctgcttcatgagtcgggctgtcttttgctgagccgagggcatagagaatagcgactgccagccgtttcaacagctcggtccagtcattttccgtagcgatcgtggggagagcatggaaggtctgctcaaagacattgcagaagtatactagacgtagaacatcttccttcttccttaccaatcccacaaactgaaccagaagcctgagctggtctaagcattgcttcgctgtgggatatggcggtgcggaaagacgttctagacactccagacgctcaagctccgtcgttgggccccggtcatcgtcgaatcccagggcactaataaccctttcccactcaaaattatcccattcggacttccagcccttatatgttgctttcctgctctgatgaccccgccaaactcgctgaacggtgcgagatgcggtctgtcgatctctctcatgttgtctcagggctcgctctcgctgggcaatggcgactgcgctctcggggttcacagcatgaggggtatgtctagtcggcgagtttccggggaatgcggcgaagggattagtggctcggccactgaggttcacttgccgtgggcgacgagagttgcccgtgaaggattgaaacatggttgcagcaggagctgcctgatgggaggatggccagcaggctagataaaacgaaccctctaaacgcagagaagcaaatcaactcaagcccgcatcaccgtgagggaaagacgaaaggtgaagaactatgacatcgccgtcgccgggtgccgatacgggagagcatggcgggcttatcggacttgtcgagcacagaccacatctccatgagacctgagcactatgtacatattgccactggaacattctggttttaagctgacataggtcagagtgaaccatataagacatacgaaaaatcctttgtagagaaaaacaaacaatgtcaaaagaggcgaaagattacttgaagtttaacctgatattcatagaatttgtcaaaatactacacaattgctcctgtctcggtgccaaatggtacacgtccaccgatgcatcgggctcctccgtggtccaaatcaagttgatgttgtagagactataatacatgggatatattcaatcaaccagcggagagaaggttgatcaatgaaattgttgaatgatgcccggaggtggttgttgtggatggtatgccgggccgctggcataaaaattagagcactctcaagcgtctagattgctgcgcactcacatcatttgaaaacacgtagaaaatccccgctatgcggtttcagtcttttggaatttctagaaaagggtcttcgagggattgggcttggcagtctcgggcgtttgggccaggttttggtcttcaatctgcttagtctgcttaggctgcggcgttggcttggtttcaagcttcacagtcttttcgatgtggggttgtgctagtcgggcctcttcggcttcaacggtctcagcccacttctccaggtagtccttgccctcaaatcctctgatcacagtaatctttcggccatttctctcgatatcttggacgtagttcgacggtgtcttgcgcatgtgttttgtgatgaagggggcgagctatcgccatgttagcagatccaacatttcagtcaactagtaccaaatggttctcaatgctcaccatgaatggctctttcgcagtctcggcgtaatgtgccctgccaggaatttcaagcttttccgcaggcatataaacacggtgctttgtcatatcgggcctgtatgtgcctctcttgtcaaaatgacccatagagccggtccggtttcccttgtagtagccgccattgacctgcttcgtagtcaagcgcaaacgcaccatcattggctgcgtgggcttgaacattatggcgacagttctatggccttgaagttggaacagaagggggatagagcgagtcgagttgtcccggaggaagatgggagacaaaactcgacgaatgaacgggtcgcgctaatctccgcgccgagaactttttttcccggcagaaaaaaagttcaacaccatctacacccctcttgaaagctgaaaacagccatcagatcatttagtactattttagtactgatctgaagcttctttcttagtcgtgaattcgatttcttaactcatacgccagtatgcctcgcagccagactcagaagcagggtccgaaagaccgctcgacgcagaaatcagcaccgaagcggaaaagcactcggtcgctaaatgcactgtctattgcagagaaaacaattcacactagattgggtgttaaacgcagtcgtcttggagcctacgatgatggtaccttcaaccgcaggagaaacaccggtggcgatgacgacgacaacgacgaggaggataccgccgcccaatacaaacgccgcagaaccgaggacaccggaagccttgacggtggcagtgacagtgaaggacacgaatggactctcggacaagtaaatagcgataacgacagcgaattggacagcgacgaagctctcggtgagagcgacgaagagcgattcgagggcttcactttccgcgcatccaagtctaaatctcacccgaaaaaagcgccacccaagccaaagaagcctacggagatcaacttgtctgaagatgtcgacgagtcggatgaggaatctgacggtgacgactacgacgaggacgatgatctgggagaagacgccgttgaccttgctacagcctgggatatgaatgcagcggccgaggaggaggaagcccaggaagcagctgcgaaatccaagcgggctgcgaagtatgatagcgacgaggattccgggtcagagggggacagtgaaagcgatgacagtgacgatgggctttctatctcggacgacgatgcagatgtggatccgcacggactttcaaaattacaagactttgtccagtccatggagaccgagaaacctacgaaacgtacccaaaaatcacaggaacagggcaagccctcggaatacggcttgacgaccgccaacaaattgactgtcgccgatctactgccctcaatcacagactctcgcctcaagaactcgctcaaacatatcgactctgttgtccaggcatcaaaatcgggcattccgggcaagctagatgctcctctagcgaaacgccaacaggaccgacttgaccgagctgctgcctatgagaagagcaaggagactttgaaccgatggctcgaaaccgtcaaagccaaccgcagagccgaacatctttctttcccgctacgtgatcctgatgctgagcagactcaccgcttagaagctgccaagccccagacagacctcgaaaacgtcatccagaacatccttgtggagagtgggctggctgaggctgaaggcaaatcagctgaggaccagattcagagtttcgaggaattacaggcccgcaatcttcctattgaggagatccaggctcggcgcgcagaactccgcaagcgacgtgacctgcttttccgagaggaagtacgcgccaagcgcatcaagaagatcaagagcaagtcttatcgccgtgttcaccggaaagagcgcgaaaagatagagcaacaagagcacaatgcactcttggaagccggcgtagatatggacgacatggaccaggagaagaacgagcgtatgagagccgaggctcgtatgggctccaagcatcgtgaaagcaaatgggccaagggtttgaaacagacgggtcgcactgcctgggacgaagaggcccgcaacagtgcagccgacttggcccaaagagaagaggagctacggaagagaatcgaaggtaagcgtgtttctaatggagacgatgactacttgggctcttcaagctccgagtcagaagatgaggacccttggaacgaggaggcttccgatgtggaaagacagaagatccaaaagaagctcaaggccctcgagggcagtgatgatgctggtgatggcatgaaggggcgccatgccgaccttttcgaaatgaaattcatgaaaaatgccgatgccgcccgcaaagaacagaatgatgcggagcttcgccaactcaatcgtgaactccgcggagaggagtctgcgtctgaggcagagtctgaggtcggtcgacgaaagttcggtcaatcaaagaagaccgaccccaaacctcgcgcaaagcagttgcccaagaatgagtttgaggagaagctagattcagatgatgaagctgcacaggccgcaggagcagacgacgatgttgacattgttatgaacggcaccaccaagcacaagtcaggagcttctggcaacaagaaggtttcacaatcctcacgacactctcccgatcggcaaaaggatacgccagtagaggaggagaacccttggctgattcagaccgaacggaccaaccgtcgccgaaccggcccagatgcccaagagagcattgacatttcacttgatgctacccagcccgaagttattccagtggagcaacagagcaagaagcaaaagaaaaccaaggcagccctcgcgaaacaacaattcgatgagaatgacagcgatgatgaggagaaggtgcccgtcttgcttaagaaccacgacctcgtgaagagagcttttgccggcgatgaagttgtccaggagttcgaacaagacaagatggacaccattaaagatgaaggtgaccaggtggtggacaatacacttctgggctggggcagctgggccggcgaaggcgtcagcaagagacaacaaaggaagcagaagcgagacctgactactgtggccggtgtgaagcctcagcagcgcaaggatgccaagcttgatcgggtcattatcaaccagaagcgagtccagaaggtaagccaagttgtcttcctatacgaagacggacaactcactgactttttactctagaacaagaagtacatggcaagccaattgccgcatgagttcgagaccaagcagcaatacgaacggtccctgcggctgcctttaggccccgaatggtctacgaaagaaaccttccagagtggcaccaagcctcgtgtcatgatcaagcagggcgtcatcaagcccatgtcaaagccgatgcaatgaatgtaaatatctcacttcacatatgccatgtccaatgttagcacctaatgcgacccatcttgcggcgccttttgaatcaaaagcatttctattcttgctgtactccattccacgtgcccaagtgcacattatagttatatagttcgaatggttcgtacttcatatcatttcacaacaatgtttccactaggcctagtgtcctgactcaggatagtaactattttatatctggacaatgtaggtggcatacgtgcctctctcgaccttgggattgtcaacttaagaccttggataaaccattagaacatgtcccatgattctataagaagtaactaaaaagccatccaaggattgtctggtgattcatattgagtcatccctgagttcttaacaatttgaatctgaatatattcatgctttttcttccttttcaatcctgtcgctctactccacatgggcgatcccttggcaagtgctgcctggagttgacatcttcaaatatttgactattcacgtctatctcccaggtatccccaattatctggtaacagtactatatacataatccagtaagtggatggtcgttgcagtgaatcccgcacacattcttgggggtggggaacgcacgcggactcgacgtgttgcctgttgcgccctacattgctgagccagacatgatacccaactcatgtcattccccttggctgaaatatgtactgtacagtactaacatctgtgaagatcgacagtctgtggaatctgtctgcagaccattcacaacaaaccagcccgtgtgttgtcccaatttgggtgtttgagctccgagggggtttgattctgttggaatttatagcacatacttgtaagattgcctctctttgaatttatttgtctccttttcaagcttcacttgccttttggacccctccgaaggcgtctaccctcaagtgattcatatccgatttggatcgaattgaggaatagcacaaaggcttcatacttcctacaggctccgcgtgtttaatgccggtgacgagatctggctttgcatcatggactcacgcttgaaatggaaggctacagccgtgctgacttggcttttagctacagaaaaagcctactgtctcccacacgtgggaaatgaggtagaagctactctgcaaaacacagctaccgaacctgcacgtgcctttgagactcagtatccaccttcaaacagtgaagacaggctgcttattcccgagtcccaccctgtacgtctcagagaaatgtgctgcatagtatatggtatggtattgacattttggactaggtgtatcgagtagctttggaacaggacggtcattcatcgcagcagccttttccacagtttgacattatccgatttgttgacggcttggaagatttgttgggctcaggtggtaatactcctgcaccaacactgactgcgacaggacagtctactggtacaggaaaatcgcatcctattcaagctacgacttcagcaaaacagcctgaaaacccagcgccaattcatacagctggatctgtgacctactcaccgcaggctgggccaagtactactgtggcacatggtatgattgaccatgaattatagcaacttcaaattctaatgcttagtagagcccgttcacatactttcttcatcctcggttacatcaaaaaccatgcctagccaagatatcttccagccggttgcgactggtcctgtccctgctaatatcaagtcccgagatgatcaccctgtgcagaaccagcacgtaagattatcccaaatgtgagcacgaatcaaacattctaatgttgtggtataggccaatactaccaaccctattgcgacgaataagttctacgcaggccttttcttgggctctcagaccaatgctaccttcactcaaccctactctctggcatggtccaagggaggtggctccctgaagagttggggtatggctgtctcccatgtccagcctcatatgcttgcatacggaccaccgaacagcaagatccccggaaacccagtacaatactacatcaacccaatcggccttcaatctctgatcttctctgcaaccgagcttaaccagtcttccatcatgaacgtcaatcagccaaaggctttctcggcccacgctgtgatcaagccctctgaaggctcggctaagcagattgtcttccccgttgtgcaaggcatgggctacgcaacagctgtgtacagtgatctgcagccggtgattgaaagtggcgttttcttccgtaaggtcgtcagcgctggttcgcctaggtccggcatcttcaagtaccaggtttacctcgaggatgacatgacctggcttctctatgccactccggctgatggcaaggatccggagttcaagctagtctcaaattcccgtcttcgcgggccccagggcttttctggtactattcaagttgccaagaaccccgcgggcaagtctggcgagaaattctatgataactcgtctggtgtatacccagtggcaggaaaaatctctggttctgtcacagatgatgtaggcacctacacgctctcttggaagaaggccggaaaggatgtcaccggcactcctctgatcatgttcgccctaccccatcacgtccaatccttcgatggtgccaccaagagccgtatcactgatatcaaccttcgcaccacaacaaagggcaactccactgcagtcattggagaaagctggactatggtcgaacaaagcctccccattgatattggattcgctccgtggtcaaccacccagggcagttctaacgagctctcagcctcagctcagcatgccattctccaggctgctccccaggagctcaagcagaacatttcaggccagacggaccttaacagcatgtactacagcggcaaggcgttgagcaagttcgcaacgctagtgtatactgtcaaccagcttggcaacagttctgatctagcaacagatgccttccaaaagctaaagaagtctttcgatctattcgtgcaaaacaagcagcaatacccgctcgcctacgattccgtctggaagggcgttgtctcgaccgccggctacaatggcgacctcaaccaggatttcggaaacaccgcatacaacgatcaccatttccactacggctacttcatccaagctgccgccatcattggctctcttgatcccagctggctagccgcgaacaaggagtgggtcaacatgcttgttcgtgatgctggtaactctgttccaaatgatccttacttcccattctcgcgctcgtttgattggtataacggtcactcatgggcgaagggtttgttcgagtctttcgatggcaaggatcaagaatctacctcggaagataccatgttcgcgtatgcgatcaagatgtgggggcagacgaccggcgatgctagcatggaagctcgtggcaatattatgctgagcatcctgggtcggtctctcaataattacttcctgatggaggatgacaatgtcaaccagcctgcgaacttcactgcgaacagggtaactggaattgtaagtaccaccattctctttccatgtctagcccaaactcgacattaacagaccaaaacaaacagctattcgagaataaggttgatcacaccacctatttcggtgccaacctcgaatacgtccaagggtatgtataccaccgtcccgctgttttttttcactccgaactattgctcacaagtattagtattcacatgctaccgctcatgccgcacagtcccttcacacgccgaaaggagtttgtgcgccaggagtggcaggcaatgttcgctgaaaacgcctctactccggcctccaaggttgagggcggatggaagggtgtgctctacgccaacctggccctcatcgatcccaaatcgtcgtgggacttctttgcccagtcgaatttcgactacagctggattgatggtggtgctacgcgtacttggtacctggcatttattgctggtgagtctcttgaatggagtatgatgtcttttcatactaacgaaacatattaggtctggggggtgctccttaaggtggtttaaggcttatttcttggtgatatggagttgggtaatgacttcttctctttatgcttattttttctggccttatgatttgcttttctctacttgcttcttgttttcggacggtccttactggtggctcggagttttcttcgattcttgtgctgtacttcgtatatatagaacgaataagaattatagaatatcatttctagctcgatattagcttgttcagttaatagacatctatgcgcctttatcttatttcttggtaaatatatatatccgtggatacaacctagtctcttatttctcccgttattaagattcctctacaaccataaagttatacttcacatagaacattttggcccttggtggtatacatgacctattatcggttcagtagtccatccatagttcccatcgccataccatgtccaggaaccgtcagaatatatcgcaaatatactaacacagtaaactacctgaatctatgccccagcaacagggagctctaaatccactacccaaggcgcattcctcgcctcatacgcgaccgtcataatactcccattaacaaaaagcgtctcctccccaacccgcagcggccgatccgccccagcactaacatcacagaacgctccgcgattctctaacatctcctccatatccgtcgccacatcttcaagtctaacaccaccatctccatctccacccgccttatcatcccacactccgcgctgtgcaccccacccttcatggatatgaccgaagagatgcagtcgtggccttgcgcgccgcgccgcgcggaggagatgctcacatccaacgctcaaatcaggagggacctgatccaggaccccggcgggcgggccgtgggttagtaggatgtcgatggccgggtaatccgggattggattttgaggctgtgggagtgcggcgggggcggggttgtagcggtcttggtcgcgagggtatgcgaaggcccagttgtagaattctggttggtagggggaagcgtaaagagtgaattttgcgcctgttgatagggtgaaggagtggattccttcttcgaggtagattattcctgcgtttcgggcagattcgcttgtccagagggcttttatagagcgggcgtaggttttgagagaatccgtgtttggggttttggctgaggaagtgcgtagggtggtttggaggttgtcgtctgatagcaggatggattcttcgcctagttgctccgggcgttgatggcgggtgtagccgaaggttgtgaagtattcttcgtccagagttatatcgtggttgcctgctattacgagcttgagctcggcgtcggcgtcgatgagcatggcgatcattgcttcgtgctcgacgcggtaccccacctttgtgaggtcgccggcgtggaggaggatgtttgctttcgggagtggatagcggtaggcataatcggttctttgaggtgggtgtggtgtgcttgtatgagtgtctgatatcatacagatgcgagtcttgatggtcgccatgttggttgattgagggaaggttgggctgtgggggagatatggataagcatcaagctcgggccctagtagcgcccagagcctccaagtacccggctgtccaacacccctactgggaactgctcattgataagttctataaaagatacattggaacatgctcttctgcataagtctttctacgaattgtattacttgtatactacgcaattaagaatgcaataatcacctaaagaagagatgaaactaggaaataattcccatggatttgacggctcagagctctacagacaaattgcatcctgtggatgctctgatcatgacatagctgaaactccgatccacccgttgcaacaaccgaatattttattttttcgtttacttgcggatagccttctggtagaaagcaagctcctcaccctccaaaatgtaaccgtcgcagcggccggactggccggggcgcgaggcaacaacggcgaacagacgaccggactcgaactggcgctcgatagcagactcggtcttaccggagtcagcgaagcgggcagcctgcttcttggcgacggaggcggacttcttctcctcctcagtagcatcagccttctgctggcgtctacggccgatgggctggccgtagtgggcctcgtaccactgacggaagggggcagcgtcaatctggacaacggccgacttggtcagggtgtttgtgcggaccagctcgttgttggaggggtggaaggacactccaatgatacgggtcttgcgggagacaccctcggagccccacgagaagttaccagactcgagacggagaccacggaacttctggttgccaccacgggtgcggacaaggtggatgcgcttggtgccaatacgggtgttggcgggctgacgacccttctcgaaagctctgtaggacaaagataggtaagaatctgcaagtggtatatcgaatccttcccctctcctttcaaatgaaagaaacgttcgacatcatgctggattgattgaatcgtacctcttcttgcggtagaaagcgcgcttggcaccggtggcgctgcgcttgtggcgagaatcccgagaaatacccatgtttgcgattgatggaggggtctaagtcgacagacacaagttagatattgttgattgtggaccttcaacaagttttctttttttctttctttcaatccttctgtttcgtcgcgagcgccgtgcaagatcaatcttcgaatatggaacagttgggcgacagtgacggtggagtggttggatgaccgttgaaagcgagacagaatcgaaagttgatgttgagggaattgaataccgatgatcgaaattgatgggcgcagcgagcgaaacagaatttgtcgaaagaaaacttgcaggagttgagatagcccggtaactcacctctaaatgtgcagcccttcaccagaaacacagattagttgtcgtagggttgtcgtgggagtttgaggtcgtggagtcgctgaatttcgcagggcgcactgtgtcgctcgcttgtgtagtgccctaaccgacactaggccgcatttggattagtggccccagtcactggatcggtcaggtgataaccagatggctagtggctgactcatcgtaaagtcacgtgctggtcactacattatcatgatctggtcgtacacgatctggacattcgagccatttacattacaacgatgtacaacattgaaccccaattgcgtctatttgcagttatactcacaactctgaaatcaatacaaatacaaatgatcggctttcccagctagtaattgcacctatcaccattgactacctatgctaccctctactggctcttgccgttcttcttcgccttctgctccttcacaaacttcttaatgcgcgagaacgaaccgtaaccctcaacaaaacacgacgcaacccacttccaccacaaacccgacataacaggcacattcaggggctttagttgagtcacaactagcaacacggtctcaatgatatgaatagccacgacatacggctggagaatgcagacgaggcgcggaaaccagggcacacgctggagacccaaatactcgtagaattccgagccaggctgcagattgctgcgttgaaagcaggtgatgtagaacagaaaacacagcacaaagatcacagcctggatgccgcgcggggcacggtactcagtgagtgtgatctcgctgcggcccagacgctttaggctctccttgtgcatagcaaccattcggccgcgtgcctccgagtagtccttcattgccggttcgatggggacgctgtagcgggtaccgtgagcggtgatgatcaggtaggaggtgctgatttcttctaattgggcgtttttggcttgggcggatgtgataccgcagtaggcttgtaggaatagtacgagggaatcttggtggtcggcgttcatgtgcttgatgatgaagtctttggatgacatggcggcggttgtagtgggagtgtaaagtgccaattgggctggattcgaaagaattgaaacagttgcgatttgaaccgagtaccacgtatgatatatggggagttggtaacacaacgggttagtagaaataagtgccaaggcccgggcctcggcttcacagtttccgctatgcctgacactttacagaagtttacactcaccacacgcctactacaacactgctgcacttttaagaaagatgaattcaactccattcaaatgattgtccaacaaatatacatagcagtatacgctccggtatattgcatccccttggccctgcacgccaggaaaatcattgtaaaaaagaaaagaacaagatcctgaacagacaaacggaaaggtattacatcaaaacatggctctatggaaagcagcatccaatcaattgaagcattgaaaaaggatcactcgtgacgacgttggatcttcgtgataggattggcaatggaacggggatgggtggtcaagccctgttgttgatataaaacgcgatcaactcctaattcggtccttgagcagacattctttgaaggggtttggggagaggaatgcaagcctcggttattacttacatgagagctaaagtaagatctccatgaatgcgtgccttcagctcgacctcgatttccagattcagttctaatctcagcttcatgccttcctcgtccagcattgatttctcctccttatgaaggacgtccatgccaccagagggcttgaagtccgagttctcattcgagtacggctgcatggcttcctcgtcgtcggattcgtactcgtctgaatcatattcagattcgtccgtgtattcgtcatcttgttgaacgggttgttttttcttctgcagctgtttgttcttctgtgtcttggtttgtggtacttcttcatcatattcctcgtcggtgtagtcgtcggcgctgtcatagtcttcgccgtcggagaggtcctcttggacggggaacttcttgggctgctctttggttttttcaagggtagccataatggatgtgatgggactagagtatagaggatagaggtaggaagaagacggtgtcaaaaaggaaataaaaaaagataaaagcagaagagtatcttaataacattgtctatatgatgtatcattcaagacggggaaacggcgcacagacatcatatcaaagtgcggaacatgacgttggaggctttgctttccaacttctctccaacttctctccaactcgccaaatccccagcctgcactggcttctcgctaggcctgaccgtggtaaaggccgtgtccatactgaaaactgcaggataaatctccagaatctgccaagttgccaacaaaatgtgcgtatcctcgtgtccgatccgtggaaacaacgacagactcgtggcgtgaaccaatggaaaagaaaagcaactaggaacaagtaaatcacttgtcatcgggcggtttgattggctggctccatcctggcaatctataactggcaatttgccgtgaaggctttgacgtcgagtggcgtcatatcattttgcgttacgtctgtttaatctattagtgtggggaacatcaatgcaccaacttcagcgcgatctaggctgattggcgcatgaaactcgctgaccactatatttatccgatgcacactttatatacccagttgctccatatgcgctccacatcgtgatccttgtcccggaacgtcatctatgcagtacctggggagtcccagcccgatgtctggcaccgatggacccaggaaccacggcattgttcccagctgacgtcggaggcggttaggttctgtttacgtccggttttatccaagccctgtgactctgatgatataaacggctgtgaaatctacatcattgaactagacgcacgattacatagttcatttattaacgctttgtccttcattatttcgtgctcgaatcgattcatattcccctcattccccctcctgacagccttcttcttcttcttttattttcactatgtccgaccaggaacaacctcccactcctaatcccgactcaacaaacacaacccccaacaagcccaaacgtgcccctcccaagctaggcaagaagtctcctgccaagcaagaacaaacccctccatcctcggaacaggaccaggaccaggatcaggaccaggacaagcaacctaaagaagacgagcctaagcctgaagagcctgccaaacaacaagacccagagtccgagcctgagcccgagcccgagcaagaagaccagcccgaaccagaaccagaaccccaacccaagcctgaacgtcgtcgtcgcagacctcgtccccgcccacaagaatcagacaccgagtccatcgcccgcagcgaaatggaaccagagcccagacctcagcgccgtgtccgtcgccagcgccagccacaacaacaacaacaaaatgacagtccgctcggcgggcttcctggcgttggcggcgtagaccaggccggccagctcgtgcaaaacacagccggtaatgccctaaacggggtgactggcagtgcaggcaaagctgttggcggggtccttggcggcggcgaggagaagaaagacgatgatggcggtcgtgatgagcagcttcgtctgcggttagacctcaatctggatattgaggttcagctcaaggcgaagattcatggtgatttgacgattggtttgctgttagtattccctcttttttcttcttatgcacatctaaccctcccatttccccgtggctcttaacttgactccatacttctgttggtgcatttcactgactgacaatctagtaattaatcttgccgcttcacagcaagtagagaagagtacatacctcttctaaatatgcttatcctttctcatctcgatgagcattcgggccccgttccacggaggtatcgggtgtgcctacggatacattcaatgacttgtttatggtttatgttacagtgatgcacgatgcatgggttgattttcttttctttcttgttgatatttcttgtctgcagataggccatcctcctggatctggcaactatcctggtgtcttgcggtgtacaatacatttaaccttcagtcttggaaaatatctgagtcaggagaattggaataatgaactaggcttttgtgttaatatcttctaatccgatgctgtatagattgaaacaagttgcctagtaaagagaactttcggcttgcactgattgaatctcggacgggatgcagtgttcataactttttaaaaagcaggtcagtcatacttggttgaagccattagaataaaaaatatatgtgtattagaacactacactctagacaactcatctagctatctattatcatttgtgcaaagaatctactcccaacagaaaaccgggcgaagtaaaagaaattaaatacaaaaagaatcaaaacaccgacagatagagaaaagagtaggtagtataaccaaatcatatatgctctcttctcatcctttataccaagtgtatttgaacccatctaaccaaagaaaaaaaaactgtagctctttcaaagagccacgagaccattccatcctactatagcctacaaacccgcaacatacatcagtccgtatccaattgtgacaataaccacaaagcacatgagactggccgggatgccgcgggtcaggaaatggtggacttggagatatcgctggccggtctgaggtacttcagtcatgatagcagctaggagaaacaagttagcaagagagctcgatacaagtgaactgaaggaaggacatactcatattagggaatccactcgtgggcaatgccatcgcaacagagcacatcaaggcactagccatgaccaacaagttggggtgaggattttccatgctaacgccgatctggcggacaagcggtaggatgataagggcggcgacggtatgcgagatgaaggtggccatgacaaggatgagagaacagaagactaagaggacgctgtataggctgaggttctcgacacgcgcggtgatacccatggcgatggtgtgcagcaagcccgatgaagtgacggccttgcccagacacagaccaccggcggcgaggattatgatcgtccagaggaagttgttgaagtcctctttgttgaggatgccggtgccgaagaagatgacgagagggatgatggcgatgacgcccatgtcgccgaaaatgtgctcgagctggtggctggcgcaccagaggacgatcgtcaggagcgtgacgatgctgataaaggactgcatgccggtccagcggtctttgacagggcggatgggcatcacggttgagttgcggcccgggcggaatgtcaccagcagcagaacccagatgagtagaatggagatgatgcagacgggcaatgcgatgaagaaccatgtgccccagctgatgttcggctgcatgttctgcagggcaatgatattctgcggcgaggcaatcggggacgctgcaccaccgacattggcggctaacgcgatacccagcacgagtgccttggcgaagtccgactcgggaggcatgttgcgcagcaaaggctggatgatagagtagcagagcacaggggacgcaacattgctgatccacatactcaagaacatactcacaaacatgttggtcaataacatcacagatggcttcgatccagctttgcttagcacaaacatggccatgcgccgtgcgatgtcgtacttggacagcgccgctgcgattgagaaaccacccaggagtagcataatcacaggagtccacatcgccgcgaacaccttgccgactgattccttgggtcccagccgcgtgtgcggctcttcgtctgaccgcatgatgcctagagtcacgactaggaatgggataagaagcgaagtgacaaacagcggaatggcctatcactcaacgttagcattcaatgtgagtcaataaacaaacagtaacccatacctcagtggcccacaagatactaacgaggactagcatagccaagcagttctgctcctcgggagtttccatcacgttcaaggaaagcattacgccgaatatggcgatactaaatatcagcgtaccaaagctcaagctacagagccataacggaaactggaatcgaccaagcggggttgacatctcctgggtgcggatctcgttcttgtcgccctggcgccgggagctagccgggtcatcgccgcccaggagggtccggcgaataccaacattggcggcctgcgcacgtcgttcgatttcgatcatctcgcgccagacagtgttccgctcccaaacgacatgctcacgcagatgcagacgcagctcgcgcctagcagactgtttatcgttcttcgtgacgatgcccgcgtacacaccctccacgttctcaatatggcgatcgatttcagccatggtactttcagtgaaaggtggtgcgggatggacaacagtggctaggtagtctcggcgcaggctgcggtccaaggttttgtcatacttcttcagggccttggcgaagccagtcttgttcagctcgatgaaggagcgaagttcgcagagtgagacgtagcattcgatcaggcgcttttttaacgatataccggtattataaagagcgcggaaatcctcgtcgttcaagtacgactcgtgcggttctcggctggtcgccggtccaaagtaggaagagtctaccaaatcaccgtagtggtcctccgtgccagactcgccatcgatcgactgcgacactctcgggcgatgtgagacggccgccggggaacgatcgtcgtcgctatcaccaccttctccttcatcgtccgccatcgagtcattgctcacagcactagaccgccggcgcggagccgagacattgttgccgcggcgggagcttgcctttatgattgtctcgctgacggggtccatattaacaccgtccgtttcggaaagatatacaccagcgtcttttatgagctcatctgcgagttcaaaaatctccgcctccttcttctgatagaaggaacagatcttatccatctcaacgtcaagagcccttttaaagattgcatccgggttgctcggctcagcgcccagcagcggagcggactctacatctgtggtagacggtccctcaacgcgattgacctgtttctcgagggtgtagatcctagtcacgatgcaacgttagcaccatcgaaataatcatccgggccggtgcatcgatcctgtgcaatgtgacaccaattcagattcccgaatctgcatgtacacactatcccagccacagacgccctgatattcaacccaacaacttacaatttcttcaaattgctgtacgcgatgtagttcgagctccaatcgggcacagcattaaactgaatactatgcgagaacttcatcttggcttttgaatcaggatcgacgttcccgtgcgatgcgttgtgagcgcgacgtcggagagcctcagcccagaaccgaagatgaaagccctgaggctggtcgtgctctaatgtcttctcctgcgattcctcaaggatatcaaaatctgtaagggggtttgagttggcggcaaggtctaaccgcccaacgctatctcgatattggtctgagcgagcggggccagatgcggttgtggtagctgtgtgggagggagggaggtagtcgacaagttcaatggaatcggagtgcgaggtaggagccaccttcaagagagaggccggagggtagtcggcctaggtcattcaaggagtatagagagatgcaggactgaggggaaggtagcagtggcctctatcttgggtgggggcacgaagaggctcgagaagtccgggtcagttggatattggggttgcactaagtaaggcaatgatatagcgcagcactccactgatcggggaaagatcttgtatctggttggaatctattccgaggctgtagacatgtagaatattgaacatattggcggttttttttttctcaccccaggaaccgttgcgcttgagctatgttgtagattaggtaagcgtgctgcttggcagggcctatcagacaatgctctatacaaagcactgagagaggtgtgacagagaacaagatgaggttgatgtatagaagtaattgtattcaaggtgtgtaactaagtttagctgagggtaggtggtctccaataataggaaccgtaacgataaggagtataagccgccatgtctatgtatataagacaacgatatggagatatcataagcgaatctaaaactccgtagcatatgtcaaattccaacggttgatattggcttttcctcgggaaatatcatgagcccatgaagaataaaagtcaaattcttttgaccagactatataaatgtacatatgcagaagtgctcagagatacaagacaaacccccaaacccggatagaagaaatacaatccaataagaccaatttagcgacgagcgttagtattcaggttcgcacgaccagaaataccaatcttgtgctgttggtccctcttctcccagacaccgctacgaccctcagcaacggccaccacctcagccgcaacacggttcgcaaacagcgcatcacgtcgcttatccgacgcatcaagaatccacttgatcgcagtacggcggcgctggcgcagagtcagcgggtgaggaatctgcacggcagtaccaccacccgcgatacccttctgctgacggattcggaagaggggcgccacggagtcgacgacgagagtaaggtagaggacagggtcgagggggagctgagatgccgggggagccccgaggagacggcgacgggggttgatctgggggggagaggcggtgcggaggtgatccagaacgagagacatgttctaatatccagttagttgattttctcaacacaccctcgccaaccatagatgagaaaagagaaccataccttctgcgccttcgtcagtttcccactctccatcatcatcttagtgaactggtcctgcatggtatcgtagcgcttgcggaagttcaacgtcttcaattcctctgggagggcaggcggatcgaacttgagcccagggttttcctcaagagcctgaccctgcacctgctcaatcatgctggcaagagcagcagtggcctcatcactagcgccatcgagtccgggaatatgaggaataaggttagcctcgttgttaggctcaacaccctgcagatcgttcataaggcttcgagccgaagtcgagaacgagcgcgagccaccggactttttcaatgcgtcccgcataacctgcggcatgtgtttcatagcgtccttatcgcggctgaggacctgttccacgaaacacagttaacacgggcctttcggctttctcataagaccctagcaagctctcatattatgtattattgctcacctcctcaacgggcgtcccttgatccaactcgggagtagcaggaataccatcacaacgcttttccttatccataattcgggagatctcgttggcctcctcgctaacatcgggcagctggtcgacagtcgggtaagtctgctgatcgggctgtggctcgaccttctttgagccatcgcgcgaagagctccatcggcactgaatgggtagtgactgaacggcgcggaatcggacggggctggcgatgagtgcgggcgtggtggattggcgcagggccgagacggccttgttggctgtgaagaggttgagtcgaggcggcatggtttcggtcgtgagaattggccccggtgtaattattgagacgagggggtcaagattaatcggcctgttttgggaggtttgcggcgagcaaatttccggatttgcttagtaagcgccaagattttgatgtgaggtcatgaaatgtacaacaatacttgatggaaataagaacaaaagtgatggatactaattagtttaagcgatgattcaaggcaaaactaagcttcgattcgtcgattctagtctagcactaaagagaagactttttctgatgatccaagtgactatctagcgcagatatattttcgcaaagtgatgtcgatatacatctagtggttcaattttaatgttgtgtttgacctattttgagttactctctacatagacttatagagatatagtgggacatgcaattttgactactaaggtactatagacaggtactatagagaagtagttttgacaaagaatacaaagaaaacacggtagatgctatatgtagcgcatgaagaatcaactaaacaaaagagggacctggtcagagatgacaacctccacaactcgaagataaagccccaaactcaagccatagctcagttggtaacatcatcagggtagacatagaatgccaaggccagaatgatatacatgccgagacacatgccaccctcaaggtaattggactttccatcctgaataagcaagttaacaaccaatccagaaatgaagaaagccacggtctcgaaagtctggaagtgcagtgtcatctcgatatccatgatccagcccaggataaccaagaagggcgtgacaaagagcgcaatctgcaagctgctaccaatagcaactccgatcgcaagatccatcttatccttccacgcaaccacaacggcagtgacatgttccgcggcgttacccacaatcgggatcagcaccagtccaatgaacgtcttgctcatgcctgtggtctttactagggggtcgatagcatcgactaggtaatcggcgcaaatagagacgaggagagtcacaatgacgagcaccacacccgcagcccacgggctgagaatgcgctcctcctcctcgtgctcctcctcctcggcgccggcgatgttctcggtatcgctaccattcgtctcttcgaagaggtcggagtgagagcccagctggaagtagagatacatgacgtagatgatcaggaggatgatggaggtgccgtgcgataagataaggatgttcttctgcgcagcgttgtccgggtccgagttctcacctgcaccgtcgggattggcgatggagttacccgagatcgcggcgtagagggttgcgggaatgataagggatgcggacgccacagccatgagcgaggacatggtcgatgctacggtggtgttgaaagactgttcgcggtagcggagtccaccgacgaagaagcagcagcccagcacgagcaggatgttagacaggatacttcccagcatactggcctggacgacgcgaatctggttctgtctcaaggcaattacactgacctatcaagaaacaaagataaattagcatcaccacccgctagcaccggtatcaatttcaagactcgaggatcggcaagcttacaatcagctcaacagcatttccaaaagtggcattcatcaagccgccaagcgcttgacccagagtagcggccagctcctcggtagcgaagctgagtagcgaagcgaggggaacaatagcaaagaaattgagtgtaaagacagcggtggagtcccagccaagggcaccggcgatgatgcccaagggcacaaagataagcaggacgttgacatagtcgcggacgattgttttccacgtcaggtggacgacgcgcattggccattgcacccatatacggttgtcgttcgggtggtggtggtgcagtccatggtcggtatgctcgtgagatgagaggccggagaaggagccacggtgtgcgccgaggagtcccgttcgctcactggcgtccagggagccgttggtgccagaggccattcttcgtggaccgaaagtgtggcttcgaaagtgagagcggaagtttgggagagctgaatataaaattcctcgggttagtttggtgaattttgcatccgttgccagaacggaattgtataatttatgagactttcacagaaagccggaaaggagcggatggggaagaatgagaagatgggaaggggaaagggagtatatcaacccacacatgatttctacttggtaccaagcttccaaagagattaaggaatggttaattggttaatcggtgggggttcaagccgcttccaaggtttttctttcttagcgacaccgacatgaaatttccgaggaatcaaagttagcacagcctttcgactgttaggaacttgaagaacaaaaagtggggccctgagtgtttgccaaggtgggtgtggcccagtcagtggggagcggagctttgaaatgacgacccatcggccttggagctccacataccagagaatgggacgcgatgattggccacagtgcaatgccaaggttgtgcactgccacagtccacgattgggacgcacggaccgatgtgtttcggagatccatggatgctgacttggacttaatctaagtcaggggaaaaataacattatgtagattggaactatatagcacatggtatatctcttttaacaccaaaaggagaaccccagtccatatgacagaaaaaaaaaggatcaaagaagaatacaacagggtagtaagtcacatcgaagtgaaagaaaaagaaaataaaaggagcgtcaagacactggagaaaagaaaaagtcaaaaagaggtataaaggatagaatcgaataggaaaaagaaaggtgatcatcattactcctccggcagcacaccattagctttgaaatccatccgactgctcttgcggccgacacccttgagcatactgaaacgacgaaacaccgagtcccgcatcccgctattactattattgagcacaggggacaacggcgccgtgccattcgtggtcgtcagagtcatcacattactatcacgtgtggcaggccgcgaataatcgcgtgtagacgggagcgtcgaccacccaccactggaggcgggcgcaatccggtctgtggctgcaccggtggcaacagggccgcgctgctgggagtcggcgcgactgcggccgtcgtgggagcgggcagccgtgtcgtgggggacattgtgcgtgttcaatgaggtctgggattcatgggccacggacggcgaggagccgtgcttgtaggtcttgtcgccgaagaagctgcggcgtctctcgcttcggccgccgcgggagtggctggttgtgcggctgttaatcgtagccgtgtcgtcgtcgagattttcgtcttcttcacccactatttggcctttgctgtcggattgctggatggtgaagatggagttggtggcgccgtgggatcgcttgaaggggttgattatgctgatccgttgactgacggattgcctgtcggagcgcttgcgcgtgtgggcattgtttcgggctgcgcggttgaggtcttgttctgaactgccgactcgctggataggtggcattcgacgattgtcgctcgaggagggggactggcgagctgtttgtgtaggcgtaggtgatgaatactcctgcggagcagggacgagagaacctaactcgggctcgaagacatcttcaaagcgtcggagtagttcggcttgggtagcttgctgagcggggcgctggtaaagagccaatgcttgtttgatagccaaggcgtggtcgacgagtgcaacgaagagcgccgtctccattgggtccaccggctgctgtgttgcttgtactatttcaccgtcttcatcaagttcctcaagcagcttgttccttgccatctccgcatcggataggaatacccgatacgatgccacacagttagaggttgacgagctgtggtcaagcagtgattctagggcatcggtcagattagatagaccagaatcctcacccgacgcagcacggcgtccaataagctgaagctcctgtgttttgcgccacgtgcgctcaatagcagtctgcagaggcgagagcgtaacctcttcggcagaaatgacctcactacgacggaggatattcggaaatgcttccgagacagtgaagacgagcttttgaacgaagtgctcccggacatccgagctggtcgtgtgtcgtcgcgaagtggaagagaagcgagatggatccgagatcaacaggtgctcgcggacagaagacggaaccttggggcgctggtagacaggatgagacacatcgcggtatgcgctaacggcgctgatctgaaggaactggccctcatagtcaggtatctcgccagtagacatgacctgcgcagtagggtgttcccgctgcatacgatccacaaaagaggccatgcgttcagtcggacacgcttcgaatatgaactccttatcgcgtaggccgggaggaaacccaagacccttgtagaccacacggaagtaacgcgggaattgtttgttgcccttggcgatgtagtcataaattcgagccatggagctttgggctcgggagagcttggcgaagtccattgtcgtgtgctcatagtgcaccgcgagctccttatagcaagctaacgcggggccccaggccatggcattttcgaagttctggataatggagaagtataaagcctctctccgttcgaatgcattctgggctgggaatgcgggcctgagtagctccggcataggcttgatgggatcccattcgtagagatcggcatggaactgaagggcaagacctgcttcagtgaagttacctgccgcagcctgagcatccgcaagttcatgaacgtaacgaataaagatgtcctcgcgacccatgtccttcatatattccattaatttcagagcgtgcaaactttgggttgaggcaccgctctgagaagccaccaaaagatccaagagctcatcgactgtcccgaccagactcttgacagcattcgacaacagatcatcggatatagtttccctctcgaacagatccaacagctcgccgatgaaaaccttctggctgacgctctcgttcatctgcttggacttgaagagcgtatccaggctagagatgatctccgtttcaataatggagatatcttggttcagatcccattcactcagaatcatcgtctgcagtatttgaacagcaacatgtcgcagcccctcgtggacactgagacacagaccaatgatgggaggcaccaggccgggaacatactggacctgataaccgcccagccttttcagattgaatcgctccctctcgtcgtccgtagtctcccaaccaatggcttcccaggtagattgcaataagtccgcaccttgctcgcgcacatcgccggcgatcttccagacagcgcggcgcttctgctcggggaaagtttcgagcgcaaggacatcactagagatcacctttaacagagtcgtgaaaaacgactcccacagcttggtatcgaatgtgtcggcatcatccggtgccggaaggagtttatcaattagcaacactgcaatatgttcaagactcttgatagtcgcgcgatggttgtacacatgaatactgaaccaggtctcgggataagcctcgcagtcgaggatggagttgtgagcctcaagggtctgagcaacaaatagtgcaagctccaattctttcaagttgggtagcttgggagacgcgatcttggcaatggcagccatgagcgcagacagttccaccaaagactcatcgaagctttgaggggtcttggcagtcttcatctggaaggggaacgccttgctgaaaagcaaagaaagatactccgactcctctactccctcagtggagatagcacagtaagaggcgacgatagctggcatgaatccataaagcagaggatcaggctgactgagcaattgagccacgattgagttgctcagtcgcacctgatctcgatacaaatccgagacgcctgaggtggaaccccagtatggagtcaaccagccaatacagctggagatcaatgttcgtctctcgtcgccggaggcgaaaacatcaaacagagtataattctgaatgagaactagcttatagagtatcaacatgccggtgacatccttgcatgaatccatgaaactcagagcgatcataattatttcatccttgctcaggacgttggagagctcaggtagccacgtatggaaatgttgaactaccagtgttttgctgcccaccaaagccggcgacgagtttctcatcaaagtctccatagccttgaaaatggtacgcatgtctctgttgaaggtggattgcaccgtggtgatgccaataccttcctccttggccttttgctgctcgcgagccttgatgatgaattttaacagatggcgtcccaccttgaaggcggcacggagattgcgagattgcgtaccgtcggtccctgcgtttaagaggcgcaagtagcttcgaataaggcacggggtgacgaatgggaagttgaactgctcatcggcgtaccggtcgaccagcgggcctaggttgtatcgtcgatcatggacaattcccagaacagtgaccaggttgttgaagatcaagttctcgtattcttcattaccagcattctccaccaggattccgaacagcgcgtcgaagacaccacttagttgtttcacaatctcgatttcgggaacaaaaagtaaacgtttcagggtatccaagacctcgtccacgggccgctctcgccagttgagaagactcagaatgacttgatcctgggagtactctgtgctgcaaagatgggtttcaaggtgcaaagtggccaatggacccgtcacagcttcatctttggcggattcattcttgccgagcgcgctccatgggaggttcagataagcaccctttccattctcaatgctggatgtctgcttgtcataagcatgcaacagcagagaatgatgcccatctctaatgaaagcttgctgatcccaaaggggcatccaggcaagagcaaagggaaattctggcgcatctgcaacactcatcactatgtgcgagccagggatttgttctgtggggatcttgaggcggatggtctggttccaaggtgtgccgcgctgggcgatggtagtgcgccatgccgtgtttgaagttttggatgacgaagggaagacacatttgtctatccgagctcctttagaatcacgtacttcaagagtgagttgaagattgtgaagtccgctggccgcctgcagaggaatttgacctgcttgcgggtgagacaggagagcatctgtggggaataccgcctgacagagtgtaacgtagatatcggatcttggcttcgtaggagccttggagaatccaatgcgctgtgtctgtatgacatcgtgcaatatagtaggattctgacgaatcaggaattccgcatcgcaactggcaaaggggcgcagatggaggtgtaaacgtgctgcggggtcggcacgtacataccggccggtgggactaggaagcaaggcgcggatcaacttgtcaaagccatccgtcagcccctcgccgtcttcgccgtctcgacggggcgaccaaatgttgatcacttgttcagtgtccttatcctgtcgaagaatcggcgatatctccaagatcccaacgccaacagtacggatcgccgagacctcctttgttggtgcgggttgaggggtggttgtgtctttgacgctggacgcactgctcgatgttcgtggaattccttgagtaatgggcctaggtggctgatccaagctcggtccgcgttgcttgggtgtccacatcatgctgcgtcgcgttttcaaactacccttggccgaaggttgaacactaccatttgtcgtggccttggttggggttggggtgtctcgcgagattgatggcctcgacacaggagtggtatcagctgtggaccgggtctctggggcacgaacccaagcaactagataaagctgccgcccattcggagatccatctccgatgtctgttgcggccaattcggtgaacagtgtcttcagtctactgctttggctcatgttgacgaatttatcaggagacggaatatctaagctataggtctcagataatggactgagtgaaccagcgtctgaccgggagaacagctgtattccgatagtcacttgccccggtgcattccctgataccgcgttgatctccagcagcaaatgatggagtgcagtagcatcggatgtctgggtgggactggattcgagcatactcatctcggactgcagcttcgccaattggatagcagagtcatcacccgttagcaaacggcctctctgctccggatcgcgaacaatcacgtccccgctaagcattttgtttgccttgacaagtttccagactgtgtcgttccgcaatgcttccttctcctttccagtcagaacattgtgtagtaattgtcgtctcgcaaagtccagctcttgtaccacggttgacatttcctccaatacatcataccggcgtgccaaaagtaattcatgcaaattagtcgaatgccattcgcgcagacacgatgcgatttcatccactaggggctctgtgagagaggtcggagtttcatcgccgatcttaagcatcgggacgggggcaggcggcttcggcgcatcagggtcgcgaggagcaaatgagacaggcgtatgcgggatcgagcctgttcgccatcgcggacttgcctggtctgacccatcggtcttgtgaatgataatctgggaaggcttcccctttttcgcaaggacgacgtccgacacctcggcaacagcctgaaagtcactgacggaataagccagactatttcgggacaggaattctccatcccagccggacaaggtcagtcgatcaatgcttttccggtcagcatttagtagtgctttatatccatcgccgtcgcctagcacctctctaatctcaacgcagttccgcgggaagatacccgagaatacacgagcttcgagagtttggcctttgatgcttgtcaagccggccagtaacgacggcggcgcgactagatagcctcgacaccattcgccgtccgtccctccttgctcaattatgtaaagctcatcgccaagctccaatggtagatctgcgggggaggacgggttgaaagggtatatggcaacggcaaatgcgatgcgaggcagcggccgccagggcatggctgtgttgtgaatcgctcgacgcgattggagctcgagatacccgatttgaggtgtgccagtccccgcaaatgggtctccgatcgcaagcctcgcgggaagagatttcgggtatgtggatcagttcgaggaatgttcgattcggtcaatcgaaggcaacatgtagtgggaggagatcttagtcgtcgagtcccgaaggggggttgaataacgagaggaatgcgggaattcgaggaatgcgacaagtaacgatctaaagaggcatgattagggaggtacaagcgggaccaaaggaattgtcgccctgtcggaaagcgaggaaagagagcacagagactgtagttctctcatcaaaagacacgaacgggagttctggagtgttgcaattcagagtatctgtgccccccttgggcgacatttcggtggagaccactatttagaggcgtggggaaaagactcaccgtatagaaaaaaaaaacacacacacagggtaagtcggagggaaaagagaagagagatgtcagatagattgaaaggaggaagaagattaaaatcgcagatcgaagatcacccccacactatctcttagccagaagctgggactttgggggataactgctttcgccttgcttcatctgttagctacatgatcacaaggatactttaagattacatctcctaacatactattaatatgcttgtaaaacaataattgacaagtctcctgaacacaattcattcattattcacccgaaacagtccacatttaccatataaatgtgacaaggtcctataagatagcaacacgtacctacatagtacttcacctatgataccaaatgaagccccgaacggtgggtcaacatggccaatgagaagatataatatcttacataggaaaaagcaaaaaacaaaacatatgaatcagtttcaagagtaacatctcatttttcattatatttccagggtctcgtctctagtagttggtccgcgggtgtttgagaccttaatagttctatggtatggttggctaagtacataatgtatgcttcaattagaatcctcaagctctagatatcgtgcataagagtcatgccttaccttcacgtccaatacacgaatagtcaaaagcttaagtcgatccgggtcttctaagagcttcaagaagtacttcatctggaggctagtatttcagaattgttagtatcaaggagttcattatagtcatccaagataaaaaagacgaagtctcgacgcaggacacacaaactattacagcagcaatagctactatatatccacgacaatgagactgctgatgaacttaaaaggaaacttgaggatatcgacccagcctttagtcagaatggtggacgggattgttacagggactcccctgcctgattaaacccaggtggaaatgaatatccaattagctcaaaggaatccgagtttaagtgacatgggtgctgttctatttggtattgtctgtagtttggatcttcgcttcttgagcaattcacctcaattctcacgtctcactgtgcacctcgatatttgcctatttaggccctacgcttctcattgcactaaatcattgcgtggtcggtgtagactttcccgaagatggaatctgaatattacaaagttggaatcggaatgagacagaaaaaaagcaaaaacaaaacaaacgggaatagatttaactctcgatacaaagtacatcttatttccggaacatgctaagggtctcttccttgcgccagtccagatccacttgaccctcgtagacatcttcaatgatctgccgaatgcggtcataagtgttctcataacggttctcgcactcccggagcaccttgacaactaggctgcgactaagaccagggtcatcagcatcaccaaagtgtttctccacacgcttcttgagcatctcgatgccacggcgggtttccttgttgtcgtagtaggtgagaaccttcttcgccaccatgcgggagtggctggcgcgggctgcgatgtcagtcggcttagcgcccgccgcgaggaggttgtcaattgactgcacgaaatcaaccaacttgcccagtgggcgatgaatgaccgcgtcgaggtagagcctcaggtgctcttggaagtcttggtgagcacgatcggtccagcgttcaagtgcggggatgttgtgcacatctacttcctcgatgtagtggttcatgttctcaatgaggagaatgtggtagttcaggatctccttgtcttccggatcacccgcaccacccgcagtgacacccggaggttgaccgggtgcttccttggcaatgaacttcagtgactcccacatcgcacggttgatgcggtcgtacgcgtcgttgacgctaacgcgaatgtcacagaaagcgccggacgggaatgacagcatgctttccaccgcattggagaagttagggaacacccgcatgaaggaaattactcccttccgcttgttcaccttgactttggtgtcctcaatgcctcggatttgctcatctacaaatcggttgaacagtcccatcaggcgggaatggattttctgtagtgcatgaagaatgaactcttgattcgtgtcatcaaagtcattcatggcagtctccaaagaatagagaatcccgattccttggagaggatcagcctgcatcgcccagtccaccatgttctgcatctcagtgggccagaatgagtaaatctcatccattatttgctcgactctctttgccattgctcggtcaggatcatgcggctggttggcagagaaatcgggacaagagcgattttccggaatggccgcagagaccaactcggaaaaatcggcgctggcaagtgaatcaagatggaagaattggatgatgaagttctgctcctgagccatcatgttcagtgtctcccgcagcgtcccggagaatgcctcagacggctcagcccttccttccttcttcccgcctcccgaagccagtcgaagcccagcggcagcccgcaccgtcttgccccgtcgcacggtcaattttcgtgcagccatggtgagaccctcggcttctttctccttctcttggtgcgtgaagaggagttcctgctcatcacccgttggtttgcgtgcggtgttcttccaagccaggttattgtcgcggaagtcaccttggtacgaaggcttggactgctgctcatagagactgacaaggctatgccactctgccatgctaacctccttagcaaatagcatcaaggcattataccgccagacctcctgacggaagtgccctcgtgcggcgctgtccaatttcatgggatctttggcaccgttgctccagtcaagacgtttttgttctgccattttgaaggcaagggccatgaactgctgcagtcggttgaggaacatggttgcaatagagcgatattcttccttcttttgcttgatcgcacgcatctggccgatttctgtatcagcatacacgccgacacttgcatcgacttgacgtttcttgttttgtccaatgtcagagtcgatcgtaaccatggccttgtacaacgtcgctagagcactttcagtatccttcagcccatcgggattgctcaaagatgcctctttgagtggtcccagctcggttacagatattgaaagtgtcttcaaaagggtctggagttcgttctgcaggagcttctgatttgctgtttgtacctgtagaccttggccttgggcttcgatataggcgacatcctcgtgaagagtctgtaatgtggtctcgttagccaactgtagatcaattccgatcccgtaatcccgaaacttacgttcagttcatgggagtaaagagtcaaaagaccatccagctcgtcacactcttcaatcgttctgtcaatcaagcttgcaagttgttcaacctttccttcctgttgttcaaggttcccaagccagctggtggcctcgacacggccaatttcccggcgaacatctgcttccaaatcctcaatcttctgttcatcggccaaccgtccgttccagcccagatcagtgaggatgtcatcaaaatcaataccacgtccgtcgagaatgccgggatcgatcccaagggcctggcaatatttcatagtgtgatcttcacggcgtctgcgacgacgtccttgagttgccggggatggtgaccttgaacgatcttcaacatttacgacaacatcagaaagattctctcgtgagacttcaggagtttgaacaggggtcaccgcgatctcttcgggtgctggctctgtaatctcgacggttggtgtctccggccctacagtgggtgcaggaagttgtagatcttgttccgactttggtaccattggactctgcgggggatcagttagggatcgggcaagggacggcgccggaacaacactggtgatgccatcagggcccgcgagatcggcctgtgactttttcgcggctgccagcagtcgctcaccagccccaccaatcctgggcttgaaaccagcataagcatttgcagcctttttccatgcgcctgcgatatccttggcgtccttcttcttgaccatagggccgagccccgggcgatgcggctcgaattcgccggtttctccggcctgctctgaggaagcttgagatggcgagtccgcagcaggggcagtctcgataggggtcttgggcttttcattggaaggctgaataggctctacagagggcagattcgcagccataatagcggcaggctctgcagctagtccctcaattgccggcgacgaagatggttcccggggctgcgcatgggctccagctaacaaattatctgatgcacttctctcttgaggcagagaggggtgattaaacgtgaatgccttatcaccaccaccacgttggggcgactttggaccaaagctgggcgtggggcgtgggactgtgtccctattctcattattggaagaaccagaagtagtaggacgaagtgtatcattgctgcgcatgaattctggtgccttagctggggctggttgggtagtaagaggcgggggtttgggaccgcgatcctggctgcgagcggaagatggacggagtgactctggaatatcggcatagttgctggattgtgctgcaacagtcagattatccgttcccctcgattctgatagtgaactcgggggcattgcatgtgttgcgctacgctcggctgcgcgtggcggcggttgctggtccagaggtggcccagaaagaagcgaatggggaggagatttatgtagatcaaagggagatggcgccggtctaccgtgtcctgtagatggccgagaaccggtcgacggccgagacatctgctcgcggctcttttgggtgcgaagtgtggggtcttcagaaggcttcctcttgacttcccgaggcccatcgcgactggtatcacgacctctgtaggacggctgtagcgaaggaggtatcgagctgtctgatgttggaggtattggaccgggtccccttggcggtggaccacctggttgtggtggctgtcctcttggtggtggaccacctggttgcgctggctgtgctggctgtcctgattgtccatgccttgacaacatttgtcgctccttgtcatcaaaaccaacgaggttggggacctttccattggtgtatttcttgtagatcttgaccaggctcccaatgaagaactccttctccttagaagtcctggcatgccagtagtatggctttccgattgtgaccgtgaatcctacattgcccgcccattctttttgttgctgctctcccggtgttctcggcacaaaagagccgaacgtttgaattgcgcttaaatcgtcgagcatccaagttttgccaatagagtaggtcccctcattgttctctcgagctttgtgtatacggactctacctgacttccgaaccgatataataatgatacgcggtttcttgttctccggtggcccgtttggcggggaagggctagaagggtgcgccgaatcctcggtgatgcgaacgtgtgttatataggattcgagtactggaagtaacagagagattagcagaggtcgccggcaaaacgaagcaaacgccttgcgatcccatctaggccctggaaataactttcgtaatgtgttgccaaccataccactattctgtgggagggcaaagccgaggaaatacgttggtcgtgtacgtacagagaccatcttcatccttttttgcgaaacaactatgaatgatccgcttcttctcatcttcaaaagcagcccctcttgtcatagtgcttgggctggaacccgaatcggagtgcagatctccacgattcagtggcggccctggcggaggcccacggggacggtctctgccattcaccatggtatcgagggacacagagctcacgtgtgggtagccgcgagatcaaggggacatggtcgggagggtcgggatcgggcgacgccactacgcaccacgcgccgaaggaattgaaacgtgtcgaggaaataatgcgcttgtaaactgcagaatatgatgagggacaaagcagtacacgttgtggctcaaagtaatgcaagtggccagcgctgaagtttgaattagctcatcaatgtgtctcggtggaaccttggaaggcggagagcttggagcggagtatcggagtatcgaattgatccggggttacctatgtcaacaaacgtgcagaatgtcagagatgaatgttcaattgagcgcagatttttcatgacgattgcttactggcgcttcactatctcacttactttggctatcctgatacactaagatgttatcgcagtgcatggcgatcatgactttgatcttattggcttctaactaactaactaattgccagcaaaaagttagtcatccatccccagggccggtctggtttcagttgtataacatgcgcgatagaaactgccgatgtaccataccttcaagacattacatacattattcgcaccgcgttcgatttccctagtcaatttgtgtccaccattccaactgcaatcaatttcatcactgggaataagaacaagcttgctgaagctagagcaattccaggtgatatggtgcagctttcaatcaaaagcgaaagtccttgaaattcaaggttctcttgaagatattgtgcgagacaagtgtcaaaaaccagctatagaagtgtccagctttcagctctaatctaaagcgaagcaaatcagaatcaaaagaccaaccggttattcagaaaacggtgactcttcggtatcaaagaggacagcatgactagaagttctttattcaaatgcagatcacatgtatatttccgaagttgacttcatgtatgtatgcatccatccatatcggtatatggcccaggtaaactttgagtgccctgaattcaggggcactattttctgtcaagacagggccgttgacctgtacaagcaaacatctatcttgaacctggtggtgctctgatatcagggaagtttcagaccggcataccatgtactagtatttagaaagaataaggcacaaaggggtggagactcggtctaaatatgcacatagattagatccgactagagaccgcagcggtgaagagatgtggccaataagagagcccttcgtagataatgccgaaatatccgcgcaccaatcacaatgcttactcatatcaaccaataacagtgaagctgatagcttaccgccttttatatactttttttttcctcccttcttttttggttcctggcagattatttctaaatagtctcttcttgccccgggttctcttccttcgctaccgttgaaacgaaccgctcagtcactatggcaaaggcttccagcaagaagacttcggtcaagaaggtaagcttcatttaccttcgattgacatatcgattggcatgatctacaaacagacctgactgacaatgccctaatttcacagactgattcttccaagaccaagtctatcccccctcagctgatcgcctcagtcgcggctttcttgtcggacaatttccctcagactagcgtcgccttcactaaggaagcgacaaagtcgggcaagcagagcgatgcgaaaaatgttccctctcttttggaactcttccaagcctcggagcagaaatctagcgtgaagaagtctgctagccccagttcttcttccagctcaagcagcagctccgatagtgactcggatgttgagatgggtgaggccactcgctcgtcctcttcgtcttcctcttcgtcttcgtcttcctcttctagctccgatagcgatgcggatgatgaggatgacgatgataagtctcctgcggctcccacctccgcccccagctccgctccggctcagaagtctgccggcgtgaagcgcaaggccgagtctagcagcgagtctagcagctcctccgactccaactcctcctcttcatccgaagatgatagccctaaggccaagaaagccaagacatctcccacccccaaagaggcatcttcctcttcgtcttcggattcttccagctctgactcagactcctcgtcgagctcctcttctgattcttcgtctgattcctcctccgactcttcttctgactcctcttctgagtcttcctccgactcctcttctgagtctgagtctgaatcagagtccgaatccgaaaaagaatccaagaaggccctgaagaaggcaaagaagacacctctccccgagtccgactcctcttctgactcggagtcttcttcatccggcagcaccctcgccgcttccccagagaccgagaccaagcccacaaagaaggccgtggagactgtgcagactacctcatcgagcgccagtcccgctcctggcaatggacctgccaagaagaagcacaccggagctcgccctacccctctggccctcctgagtgaattgccccatgaccacccctcgaacgactacatgtcgtacgcctatgcagaccgtgcctggaaggacttgtctgtgacccgcggcaagggattcaccaaggaaaagaacaagaagaagcgtggctcctaccgcggcggccccatcgacattgcccccggcacgacctcctacaagttcgaggattaaacgacgacgcttgcttttgccacacgaacgtatttgctagttcataatatcaggctatcgtcagcatctaatccaaaatttgccaccaaacccaggctttttgtcttggatgtcgctttgccgaagggaagaatcgctgtctttttgctgctgcaatatttgcattacgactcaggtttgttgcaatggatcaatatgaacagccagggctcttatatcccgcatcattctttaccaatttcactcagcatggcgtatggagctatggacaaggtcgttggacccaagatttgccatagaatcttttttgcttattagcttacatcattcaaaagtttgaaatccgtcctcgacgaattctggaagtattttcaattctccatgaagtaggaaaggacgtaacctacgaacacaaaccccttctagccttattagtctctatcaaaaacagtgttaggtacccccgtacaaaacaaaaaactataaaacccacaacctatccatcctgccttctccaagccccaggctcctccaaagtctcccacctacaatcccaacccgtatgcgtcccacgagcagcatccccaggcttaagatccgcaaacgcgcgctgagtcctcagcttagaagtggtagcggagtcctcgtcatccgggcgctcatatccagccaaattgaatgcctcggcgttccagcgcggtaaactccccggacccatattcacacccaggtccagattatattcgtaccactctttccccggaccggttaagtcatccgtagacgcaaaatcgagctggaccaccccgtccacgatgcccgtgtagacggtcggcgaggagggtgagggtgaggacattgtgtagatggggccgcggtaggggcctctttggcgggtgcggactgggtgtggagtttgttgggggaatgtagggggtggtgggtgggagaggaatatggagaagccctttttagggcggggttttgcttttgttctgggtatggtgttggcattgaattgcgagtcggggaattgtgcatcgaggtaactgtatgtgttgcacatgcgtaggtcgaagattttgaccacggcttcgccgccagctccggctaagaagcggtcatggccgaaggcgtggaggctgtaaatgggattgaggtccgtggcgtctctgtaggagacttcggagggccttggggagcgcaggtcgtgaagtcttacggtgtagtcgtcccaggcggttagaaagacttcgccgggggagcctaggttgtgttcattgagaggctcaatggcgccgatattggcctttgatttaaggtttgtagagtcggcgtctaaagaaccaattccgattgttcgatatacagagacaccgtctggtgtgattttcgagatagacaaggagttttccacatttccagttcccactgccactagtgatgaggatagcagtttggagtagttggttcgtgacgagccttccagtcgaagccatgtaaatggctcgattacttcgtcgtcagtctcggtatgatagaaagcgatgcttccattttcaaaatgagcagccaaagtagagtctgtgccactactcaaatctgttttatcgaggttgagtccaaatgatataaacttctgcttgtgctcaaaggttgcttcattgggagagatggcaaggtgaacaatatcacctcggacccgaccgaagatcagatgctccacatgggtatcgttgctgtatcgagtcgctgaggacaaaagatgcagagaacaaatgtcgtcatagctgctaacatgatcaatatcgttaaacacaagccagtcttcttgcgcgcgaacaccagtttgcttgatcctcatcacaagctgattggcagcaccccaggcaaggacctctttcctatcagcccaacgctggccattccaggtctcgtaagaatcaattgaaggtctgtacccgagagtcgggttatcttggcgagtcacctcgtgagaaccgattttggtcgcagttccaggtggcacgacaaatcttccgatgatggcttttctgtccaaggcccgcgacctagaggtcaaagctcgtgcagcatctttccagaatggcggtgtttcgatatatggaaatctacttcgcacaaacgctcggaagatccgagaattttcagctgtgattatgccgtgcagtcggtgacatgtctgggacagatgggccaatgcattggcagtcgggagatgtgttgcgatttgataaatgatctctgatgggagctcggagagcatcttgaacgcggaagccagacagagatgtgagaagagtaattgtttcgggctttcagactatcgccatcatttgttttccgccgcttttatatgttttgctgttcattgagtgtgctagaaaggggaagagctccatttgttcaaggacaagtagattcgagcttcgatttatattcaatttgacaattttcgaccgtcaagatgttgcaggtcagcaatttcatacacaaattgccccatgtgggcactggacccgttaccttatgacgtaagcatatgggctcgcttgggcagcagctcagcctgtcctctttttttgtgcaccaaaaaggaattgtatagatactggagcttcaaacttgagaaacaagactacattaacgtgtatagtagtttctaactccaaaggaaaaggatctgaaggcacagatgcagcaacgtagtccattatgtacgcttatcttatcgcattcccggggaagttgtaatgtcacaggtctcgttggacaagacaagtttccctatcgaatctaaaggcgcatatacactctcctcagcggaatctgattcactggctgtccaccggcagatgacgaatcagagtgagtgggactcgaacggtatggggcttgtaggttaatcttgcaattagggaacacactcggcaccacctgtaatacacggatgagtgttggctggtctaacagctagtggcatagccgcgtcggcaatccccattgtatacaaccccgaggtccggagggattcccagcttttctcatatttgcaaagtatctagattttcaccaactatctacagtggacggcaaacaccggcactcataatggcttattcgatcactgctcttgcggcagcattcttcgctggcctcatcttctacagagtgttcatttacccagtgtttctctccccgttgtcgaaaatccccaacgtgcactggagtgcttccatctcgcctgcatggatgttatggaggcgcttcacaagccgaaataaccggacaattcaggccgcacacgagagactcggtcctatcgttaggttaggaccatcggagatctcgattaactgtgtcgatggaggaattaagacagtttatgctggtggatttgagaagcatgactggtacccacgagtcttcgggtcatttgggttagtatagacaccgattcacagtaaacaaagtagctaaccatgagaaacaggacagtgagtatgttcaccatgacaggaagcaagacacattcaacccgaaaaaggatgttgtccaacatatactccaaatcaactctgcaaacatcccctcatatgcggatagtttcagacacagtcatcttcgatcgactgctgccgattcttcaagaagtgtcaaagtctggcaaatccatcgatatgcatgatctagaccagggcctgacgatggatttcgtctcctcctatctattcggtttgcagaatggcactaattacctgcaagacgattcggttcgtaagcactggcttcacctttacatgtgccgaaagccgttcgagttttatgcccaggaggttccatatttgaatggatggctgagacggatcggtcttcgcgtgatacctaaatactgcgacgacgccaatgaaatgcttgatgcttgggctctggacctatgcgatagggcagagcagatgatttcgtcgaccgagccaggaatcgagccaactgtctacaagcagctgaaacaatctctggacaagcattccacaaagaatggagaagcaaagccagataaggcccagcaacgactcgatattgcttgcgagatgtacgaccagctgactgccggctttgaaacaagtgctgttggtctgacatatttgttctggcaactctccctacacccagaagtgcagaacaagctccgagaggagctactcactctgaatcccccgattttatatcccaagacagccgatctgccaccagccaagtcaatcgatagcctgccactgttagaagcgatcgtgacagagaccttgagacttcatgctccgatccctggcattcagcctcgggtaacgccatctccctcgtgcattttggccggctatgcagacgtcccacctaacactagagtgaatgcgcaagcgtattcactgcaccgcaatccggaagtattcccagagccagaaacctggcagccgaagcgttggctggaagctgaaaactcgccggctgatttggaagagaaacggcggtggttctgggcgtttgggagtggaggacgtatgtgcgtgggaagcaatcttgcactgcaaggtatgaatttaagaattccaaccattgaactatgctgattactgcttggcagaaatgaaattggccgtggctgcgatttacaccaacttccgcaccacgattgtcaacgatgacaacatcgaggccatcgatgcttacaccgtgaaaccgacaggtgataaactgatcctcaagttcgagtctgtctgagatataccaggaggggatcttgcaagtgcagccattgctgcaagctgtatgagctcggaatagaattaattcgatcaatggaaaagtatcaacattgcagctgaaagaataaacactgcttcccgccagctcatgcaatatccaagagcgtaaagtggctaagaatgatcgcaaatcgtgatctaataagctaggatagcaacaactcctgtccccggtttcggtagcacggccatgttcggcctcttcggcgagtgtagtatgcagactcctaacagcccgagagcccgaggatactaaagaggagaattgagagctgcgagtagaaatttgatccagcaaagttcgcagttcttcataaccctcatatcagccacaatccatcaggcaccaccaaagagggatggcagtgacattagatcgtgctgacctggtgattgatcattattatgtggaggatccatacacgcatatgtaggaaataagagttaatcaattgttctgacaggtccaaatcccacatagttgtatactgtacatatgagtaaaagccaactcccatagcctctgatgcaaaataagcagaccaaatcagaaaatcctgataaaggccagagtattcgcgtaataatgtatcaaaaagaaacccaaaactccaggtggacagctcgctcctgctgccaagtccggatagtcgtgcaaagaacattttaaccgagaacaccgtccttcttccgcgggccaacaaccttagggtacattctcatgaggtggtagttgacggtgttcttcttctgctccctggatttctatagatggaaataccttgttagaaggatgctgacaataatgaaaagaacggcgatggattataacgtaccggtgcatccatgcacttccgcaattgagcctcgagagcagagcagccctctgcgccgtatccagcggaagcccagcagtctgtagcaacgcaaattgtcagtcgagattcaaggtacttcgaagccagggcgacgagaaattgatagcgtcaatatccctaaggaagaggaacaaacatactcagcatagaggacatcactaccacgcaggggttctgctcattctgattcggccggcggacacggaggtggttgatggtgttgagacgcatcgggttgagccgggtggagagggagcctttgggtgccatggtgggcaattattaggttcgtagaactggcaatataggtatcaattggaacaagaagaggccgaaatgccttgaagcgaccgtgtgcaggattgacgatgggatactggcgccggcgacggatcttcgacaaacaaaatccgaagtttcgactccgcggaggtagatgactaatcttggccgcgcccccggccctcttcatctacctcgagggcttgccaccctatttacaagacctatacactctttttgatattgcaagtttgtcaaaaccaatacatggttgttgaatatgtctgggagatacggtttgccaacacagttccgtggcgtttcttcggtatgcacctttagagctccgatagctcccactcctaggcggttctccgcagcatgccacctgaaccaaacatcgtccacgtctacggtcaagacggaggataaagatagtgaaaatggctcgaaagaagaagaaaaagatagtccgatgggacgccgtctagctcaaatgaccgaagatgcgatgctagaaggtggacgatctgcgcgtcgtaacatcgagcaagcagggttctcggaagaactgaaaaataagctcgcagagcgcgttgctgcttcttcatttaggagtcagtatgctgctgctcattctatagtcgaaatgcccgtatgtgatacttataatgtcctactgtccaacagccactaacccacattccattattgcagtctgcggcagggcaaggcacacgagagaacgccgccgctcctccatggacaggaacagagcgtgtcgaggacacgactctgcgtatgctagatgacgcgagcaagccgatccgaatgccttacaaaatccccgaccctgtgaaccttagaatccccccgaagccgaaaaagtcccatggagagcgaatcgccgaagcgaaagagcgcacctctacctacacgctaagtcgggctcccgggttttccgaagaggagcgcgagcatatgcgccgtgagatgagggagaacttgacacccggggcgtattccatgccaatctcgatctcgggtctttcgtcgctggcagatgagcgaattcaagatgcgattgcacgtggagagtttaagaagatacgtcgtgggaaaggtgtaaataccaagacggaccacaatgcgaccagcgcattcattgatacaaccgaatattttatgaataggatcatccagcagcaggaaattgtgccgccgtggatcgagaagcaacaacagcttggcgcggaactcaatcgattccgcgaacgtcttcgagcggactggcggagacatgctgcgatgttgattgcgagcaagggtgggtccttggacatacaaatgaagcgggcaaaagcctatgctgcagccgagactcgactggcagacaaagcaaagttggaggctttgtttgaagaggatacgtccgtatccgagatcaacactgatggccggattgtctccaagccagagacatcccagagatcacctacaataaatgacagcgaaaaagcctccgaagatctagcccatcttccaccattgcgagaccccggatacctcgcaatcgaacgttcttatcacgaactcgccgtgaaacaaatcaacagtctcacacgctcatacaacctccaagctccagccgccgcccacaaaccatatatcaatcttgaccgagagctcaacgcatgctatgctgcggtagcgcctgacttggcagaggaaataaaacgccgagcgacagagcgtgcgcgtccgtcatcaaccgttcccccggtttcttccatcaagtttgggtcactaggaatggcgcagtctgtacatgttcgcgaagaagatcagtcgaagggatacggtataaaagagctgtggcgcgatttattcactaaaccctgaagacagcaaacgacaaaacagagaactttcacccttctgttcatcctctgtcaggctatatcggagataatgatacaccaataatgtgacatagaacatgagcaatggcactcgaaataaaacagacaaagcgggccaacaccacctcccgacccttcaatcttttccctcgcaaaactggattggaatcttccgctctgctacgaaaagaggatctccacacgacgtggctttctcgtcaaccacagaaagctcaaagggactccgacgacgccgacggtagcaacaataccaataccaagcccattgatcaaaatgaatgaggcagcattcattgtcctcatgccagcagcggcagcaggcaagcccaggaccaaacagagaatagagagagcagccacaatgaatgcttgggcgaggctagacaaaagtttacgcttagccatacgcctgatcgcgggcggatccgcgtaaagacttgatgattcccgtagacctcgccagtcgaagatagctgcgctgacgcaggtgataaaatgaaagtacgtcccgaaagcgaggagaaggaacgcaaccccgataaaatatgccgcacatggagagatgctcatgtacatgcccaggtacccattctttggattccaagcctggcaacaagcctcattcttagcccacgagggaatttcggtagtcatattgctggcttcgtctcgcttttgcatggggatgatgaaatgatgccacgggatctttgggaagtctcccgggggccagccggcttgctcaagatcggaatcgccgaagggtaaacgcgagatgacttccacgtccccgacccagatctcgttgacggcgttgccttggtcgtagaaatggtctgacttcacgccatggactgcggatactttgttgcccattcgtgccttggacaaattggtgtgagaataatggggtggtttaatgattctggtacaaagtagtaatgattcttgtatagaaagaaattgatggatgatgaggatgagttgggcatctttctcagttgactgggcaggtaatcccgaaagcagcaaaaagggaaggtgctttggtgtgttccttagtgaaggagatggatattcttgtcaacctcgagggtttgcatctattctatggtgaatcgtcctatctcgataggaatgctcgataaaaattgaattatactgtagcataatgtcattcagagatactcgtcatgcagataattgcactacggcacttggggatatatctgaatggtaatatgcttgatttcagactaatgaagtgtatttaagtatccatactctcatgtatctcatcctttatggaaatgttctaaaataggtcaaatggacttttgcggcagttagtgttctctcccctgtgagtggtcgccgcgatgtgatgatcgtgcatgagggcgcgtatttctgaccaacgacaaggctaaactagaatgctttgacctgggtactgactttctcttcacttcatcacatcctatgcttgcttcttatacgtagcccctccctctgtcgcccctcctctgcaacatgtatcacccgctcgtgtgagattcgacgtttgaaatgtcgatcagtgactacgacttttgaaattattacttctcctcacccccgatctcttttataatcctggcggaaatgactaccccggttgtcttctttttgcctatcctttttactgtcttgattgtacatagtacctcggttcaggcccagaaggtccaacgtcaatcaaaacccgctgcgcccccaacagtggacaagccattactagctattcaaattgggagcattgcgggcgcctatgtgatcttcgtcgctgtcctcctagcgctacttatcttcgttggacgtcgcctgcgtcggacagttcagtcgtccaactatacactgcatatggaaattctgaagcctgtcagacctcctgtcagcatggatcccagcccgatttctccagtgtcacacaatctccctagtcccagatcaagtggattcaggtcctgggggtccttgaacagaagtaccaggccgtcccaaccatctatgaacggcagcatggtgaccatcgacgagtccatcgtcgcgaatgaccgtcaacgagcccagcatgatatggagatgctctatgcggcagttatggaacatgacgcccagaaggcttccggaattgatctgtcggtccgcgaacaagacttccatgcacaatcaccggacagtcaactcacaaatccattcactgatcgcggctcccacggctcagagaactcattagcaccattagctccattgaagtcccccaccaaaggattcaacagctcccgcttatccaagctcttcaacccaggctcccgcgccaatccagacccgagcaaagtgcgctcgccgcgtctggctatccgcaaaatgcctatctcctctccattagcctcgccagcagtggccacgcctcaagcctatgtgtttgaaaacccgcctctttccccgcggatttacaaccccggtcctcctccaatggtgccgcagcagcatgcgagtgagtcaatcaggcctgctcctgggcgtgcccgcccacctgcgcctctcactctgtctaccccctccccttcttcttctgtcccgtccaacctgcctttccgggaggcatacccgccgcaaagtgccccggctaccaagaccactatcttggaacgaccgatgaagaatcgggcgggtcctctcacgggcatggctacaccatacagtccgtacatgccatttactcccgtgacgccctttactcctgggcgcacagtcacaaagcgacagcggaagcgggaggagcgtgggaatggactgcaagtgttgaacgaagatgatttggttaaggatgacaatgatatctggggatgaatgtgtcaaatttagtttaggcgttcgagtgcattcggttcaatccatcgtttatctatagagaactgtcacacctacatacactggctgtataggtctatttcagaatctaatatcctgcatagctcgtctctagatctatatctacatcttctccttcaaatgtgtattccctctaacaatcgcctcagcaaaatctgacctcgtcccggccttctcaagactcaaaagtgtctgaatagtacaccccctcggcgaggaaatactctccctaacaaccgctggatgctgtccagactccaacacagcagacaatcccctgatcccctgcaaaaccaactccatcgcatccgcccgcttaaacccctccgcaacacatccatccagcaacccctcaatcggcagcgtcaacgtcgccatcgtcgcgccaacaagcacagtcgccaacccgatctgctcagctcctaggtacttaaccgcaccgacatgcttgaaaatccactccgtaaccagaaccatggctggtgggattgacggcgccggcgtttcgatgatcgtcatcgactggccgaactgcgcgcccatgtttgggatagctttcatgaggtgcggttgatctgcagcgccgggatctgggttgatgaggcgggttagggtttcgcatgattggcctgcgagcatgctgatgacgagtttcccagcgagggcgtcacggacgccttcttctcttagaacggcttcggccatgaagggcttgcagccgaggatgattacgtcggcttcttgcattgtttggacggtttggtcagagacgattttgattagttgttggtgctcgggggcaattgttttttcgagacgggatgcggaactggctgtttttgtgcaggcgataaagcgagttataggatttggtgttgggtcagtgcttgtggctgagaatacgctgtttaggaggcctttaagcacggcgcctcccatgttaccttggggtttgttagtggtagttttactatgaatgttatgtttacttaccgcatccgatgaatccaagagtctgtcctgaggccatgatgttctgaataccgagagagacggagagttgattgagttgaggggtttggctatctatttgactcatatgggatctcgggtgaggtgtccgacgttggcggcagccgatgccgagattagttttaattatttaaattgcagaagaacatgtttagaggattatcttttgaagctatatttgagatgatacgtcaattgccctcgaatgattccccgtgcttctttccccatgtctatgcaagattacttagaatatcacccattgctggacggagggtcaaatataaagcccaattccttgcatgagttatcttcgagacctgcaatgagcacaagtccattcattccattattcacaaataatatctgatctttgcctcaggcgctaactccgccttacaagtggcgtataacagattaccgcattgggcttggcttcgtgttccccaatgcagcagggattcccgctatctcttcaatcttcaatctttacactcactccttttttgcctaagaccctctatggctgtcaagatctaagcctggacttaattgtcgaatgaacaacactgttgtctttttttatcgactttgctgatcggccccgctattcccccacctcacaagttgcaactgtcgtcatcctcggagaagtcgacttgctctttccggccgagttattttggtggacagtactcccgtaccttgtctcttactccattagaattcgtcgtcggataacttgtgtgtacaataagaggctgtaagttatctcactcttatcttggcagaggcgcggtttggactcggactgtcttggctaactggaacttcttcgcaggtctcagactttctctcccctttcctccactactcgtttacacctctctgtttttttgtgtttccagtacggaccgcctacatgactctcaccgtcctctcccaaacccagctccgcgagctgctgcacgcgctctctcgcgacgagatccttgaattgcagcgcaatctcggcgaggctctacgagaatactccagtggatctcaggaggaaggctgctcggcagcttaccaaccccagcgaactgccattactcgtcagaatggttgcaccaccctcttcatgcccgccagcacgggcaagaccattggcatcaagatgatttccctgcaggacgggggcgctgccggctgcgctaatgaacaggagaccgtggatgcacaggagaaggaccagatttcctcgcgcagacgaggctctttccggaactcggtggcttccatatcctctgatttgagtgatttatctttgggctcccaagaagacaaggaggacaccaccaacaatgacagcagtgtgacaggatcaagcacggatagtcccacactcctcactggttgtgtcaatcagcaaaatgtcacttcgaatatttctagaactcttggcgcttggccgggcgcaggaactcgtgacacatcgccgcgcggcagtgtgacactcctagacgacgaaagcctgccattcgccttgatcaacgcccatgagctgacggcattccgcacggccttggcttcgctgatgatgttcaacaggcgcaagaaggtgcgcactcttcttgtattcggagcgggcacccaggcttactggcacatccgcttgtcattggttctccgcggtgacgacatccgccgggtatacattgtaaatcgttctttcgaccgcgcagccaaacttctgcaggatatctatgggcctgaaaacagcgaatggcgcggggacgtcaagttttccgcggtcagtactgatttcggcgagtatagtcgcatcttgaaggatcacgtgcgcaaggccgacgtgatcttctgctgtacaccctctccggtgccacttttcccagcggagtacctcacctcgagcgaaggccgtcaaaagggccggttgatttgtgcgattggatcatacaaggcacacatggccgagatccacccagatatcctccgagacgaggtcactgtgcagggtccacatagacactggcacaagcatatccaccgcagtggtgtgattctagtggatagtctcgacgctgccatgaaagaggcgggcgagattattcaagccggaattaaaccgaaacaagttgtcgagttaggcgagctactgatggttcgtaatgccgctcgcgaagcggcgaccgtggatgaggaacagagcttgcgtgagtgggcacaacgggggaacgtcatctacaaatcggttggacttggactgatggatctcgtgactggcggagatttggtgcgcttggcgcgggagcggaagttggggaccaccgtggaggatttctaaatgacttgggcgacttggctttgcactttgccctttgcacttttaacgacttttgattcgatacctttttttgcttattttacattgctttctattggccgatcttttttctctgggcgtctgttgttccagggaaatttcgaagatcaacagatctgccgaaggtgccacaatatctttaaattaagagaaacttgaactggaatacatgtcagaatacacatggtatgactatcaaatagcatttgggagctggaaatgagaacaaggaacaatatcatctctatcatagaacctgaatatcaaagtaaaagcttgcacataacctccaatgatagtgggctgatggtctgcgtcatcgggtatgtaacctccaaggctctcggacaatcttccctctcgtttcaaacgtttctctgagcaatctcccgctgcgcattaccaatccagctattggtattggatcttgccctagctgctctagctgctttagctgctgttggcgcacgagtcttcccttccccgcgcagtgaggggccaacgcaacgataaagaaaaagtctgctctactataagaagccttatagctccccagaatacaccccccagacatcctcgccatgcgcaacaccacctgctacttgcccaatggcctctcctttaatgtatcgcccgttttcgggggagtcaccttcaaatccgccgatttcaacgcacagaactccaccttccccccaggttggacgattatgatcaacaccgagaatgcgagcaagacagacgagcaaggagatgaaccagactcagagaacccccgcgacggtgacgataatttttcccgtttcactacccccaccttagcccgcgattccctctacatttcctatatagtcaacccaccatcaagcgagttcaagcccgtgacctcacccacgcgccagattgccatgatgctctgggcaactctatggtggtacttccacgagcccgaaccagacctgcacgtggagaccgtcgcatcgagcatgaccccgcgcgacggacgaccaaaaggcgtatggcgggtcaacatcaagcgcgaaggaatctttaaaggccgaaaccttctccagaagctcgagcgcatgggactaatagcgaccgaagactcctccgtcggcctccagcccatggaatcccgcgactcaagcagctggtcaacgatgttcgtcagccggcgcagcttctggcagctcgacccacgcctattcctcttcacactgacgccccgcggaggccgtccatcaacacctccctaccggtcacggaattcgtctcccgcgtcgtcagagggtccgccccccgcagcgccgctggtgctcgcgcccatggaggcaatcttccacacggcgaatatgggcccattcacctcagtaggaccgttcacgtccggcagccatctacccacatactacccgccgccgccgatgcagttcacctccacgaacggcgtgcgacaccccgtgcgcccgaaaccgccgcaccagggcgaggtcttctacgtgcgctacatccccagcctgagccagtatctctcattccgcgtggcgtttgtgccgatgaaccccgggggtactgctagtcggcctgggacgcctgttagcacggctgtgacgagcatcacgcaccatctcaccaagaatatttcctcggatctggacacgatgcaccggtggatgaatgtcccgcgggtggaggcgatgtggggtgaaggtggggataagtccgtgcaggagaagttcttgctggctagtctgactagccgccacagcttccctgtcatcgggtgttgggatgggaagccgtttggatattttgagatctactgggtcaaggaagatcggctgggacgacttgtggaccacgtggataattatgatcggggcattcatctgctcgttggggaacaggagttccggggtgcacaccgggttgcggtctggctgagtgcgttggtgcaccactgcttcctgtcggatatgcggactgaatctgtggtgttggagccccggattgataacctcaagtgagttatggacattgatttccaaggaaaggaggatatatgctgacttctcccagactcattaattacctccaagaagcaggcttctacaaagaaggcgaggtcagcttcccgcacaagcactctgctattatgaggatcaagcgcgagtactgggaaagcccggctctatagagctgtcacggcggcgatttgcattgagacgatcacgagtaacgaaacagctagcattacctggatttgaaatttcttgctatttgacttggccatttatcatgccgttagcccaatagaacgaccggtatggtcattgcttattgactagacctttgatttcatcttctatcttctagactcctttccctaggttgacccgacgagaccgtcctgcttcgaaatagtgtattcccagctgcttaggattcgtatcataacgagagagccgtgatatgccgtttcccgaggaccatagtacgacgttacgaaatgttcgatgcttggtccggaggctcccatcatgtcttctgaggctcactcatttcgcagtagtaaatggtagattggcaatctagagaactgactaatgttgatggcttgatggaaataaaggaacagaggcctttaagactacaaagaaagggacctgtcaaactgtctgagcaagaaaaacaatctgcgctcattgcaacatttctacccagactcatctgatgtcgatacggttgcttagcaatagcgatatataccccctaagcccatccgaggctcttagcgagaccgtagaggcatatcagtcctgtcccaagtaacaacgattgtcccatacgacaaagatcaaggcgttagcacaactgcgcattcaatttcgaaaacgcctagattcgctagacccacattctctcaacgcttcgtggcctgattcagataccgtatttccccgctaatagggtcgttgaaagtagcactgtttgtgtacagagaatccaggactagcctcacttcatggaggagatcagctccaaattggggatattgttgagctaggtcggtaaatgtgtgccgtttgccttggagataccagcaaacggaggctgcggctaaagtacggcgtacgggatggccgttgcgcaggagagttcctgaaataatgtcttcttctcccagccagcgggtgttcttgtcgcttgtgtcgaaatttcggtagtattccttggcatcgggatgtggattggcaatagccttcttgatgtatcgggccgtctgggattctatcctggtaatctggtatttgtccgcgagtcttgcgagctctatagcagctgaaatacgcttcttggtgtctttgatatcaaacttgacaaaacggaggtatagccattgaaggagggcttcaaggctttgcttagagacaacgccttctatttcttctaggtccactgtctactcttgggcctctcgaaaatgaccttcgaacatggctgtgaaaactggcgactccgcgcagaggagtcctttggaaattgtgtattcacaaccaatagattggattcggattttaacaacaggaccatgatagagtggaagcgttctaggtaatggagtgttagacagcgtggaagccactcccgagttaaagcctacttacgctgttgcgaaggacccagcatcttcctcatatatctcactcattttcctcttcatagattgactgtttgaaagaccggtgttgcaaaggagaatgttaacgaaagatatggagatggctttgtgatctaagcaaagagagaaggctggaggaagctacttaaacatctgtacctgacaaacaaggaaacaaaggcaccaggccaatctcagcaccaactgccaacgaattcctccaatttcaaactcatagattccctagatctcacacttcaccccagtatctgcccaacttccttctttttcccgctaaaacggtccgtgaccataaacgccaacgcagcgtaactcagtgtactattgctagaagtggatgtgtaatccagatattaaattttctatctaaaattctttagatatggtatagtaattccgatacatagtttgaatttgtacggagtacgcgtacagccttggcatgtgcccctggttggccgcgtggatgatgggcggtttctctggagataaggaagttaagggtaggattgaggctcaggataaggatgattattcgcaagggaaagggggatgaggggttatgaagggatatgcaatataggatcctagaaaactacgcaaggggtgacttcagcaccgccttcgaaggtctcgacccaaacccaacttaaaagtctaggggtctacgtacttatgactatgaccgtagtgagacttatattacagtattatacagcgagatccaaaatcaagttgagtttcattgtccaagtaggaagtaagtacaaggtacgttgagcgcgagcaaagaattgtaagcgtagagattgttggatagcatccagagaatgaaaaacgagtgagacggaagaccacaagcataagaaagactagatgacagacatacaaatgccgacacgaggcagatgcagtaacgagtggaatagataagagagatgaaaaggaaaagacgagaagaaagcagaatgacaactttcacgtaatcaagctcatacacggtgttagatgacatatatgaacatcaaatagtaagtgtgagcgaggggtattggcaacatgtgcgtatcaacggggtgaacagctttttcaaaagcggaaatatggaaatttgaaaaggaaataaaagagatatgggcatgtatgagtgagagcgtaagagtcagtgagataggaaaaaggagagatgcgtgggagtatcggtgattaagtaaagatcagattgctaaaaggggaaaaagaaagagaggcaggagagatcgagaaccggctcgatttagtgagaccgacgaccgcccatgtaagagccggtcgcggaggcaaggaagcgagccacgaagccgccgctgtgcgcgtggttgctggtcttcagcttcttggatggctggcggataggctccgaggacttggtggattcgatgtgggcgacgtccacgtagctgtggttcagtgagagggatgacgggctgcggttggggtccgcgagcatgaggtcgtcggcaccgttcgaggaaaccgtactgatggaagctggtgtgcctcttgagcttggggcgatgctggacgagcgcgagcagagagagttgaaggtctcggcgtgggagagggctggcacgtcgccgacggatggtggggagacagagcgggtggttcggctgggggatgcacgctggcgttggtaggggttgtagcgatcgtgctcggcgatattctgtgcggcgtagtgggtgttgtgcatgcttgggcaggagacgtggctagggagacggcggagagagttgtcgtttccgcgacgcgtctcgctccgggcctcgagcttttgacggcggagtcggctggccagtaggtctgctgatgagtgaagacggcgcctaggggtgggttagtatttgttatgataacaggttgtaaaatgggatgctgtaccactcgcggtgttgctcttgtttgtggagatattcctcatcggcgatacgttcttgctcttgggctatcaagcgctggcggtgggggacgagaaaaggctcgaaataagtgaagagatcctgctcggtgatgcgcaggtcccagtccagaaggaagaggagctggcgttccatgaggttgacctcagggagagagaagccgaaaccttcgaatcccttcactgcagtgtaacgggcccaatgcttgttcttgggactggagtcgttcagatttttggcggccaggatgagcgaggcgaggaagatgcgatggacagtgcagcgcatgccctttgcgactggtggcagacgtgatcgaagacgaccgaggtagacgagacagctcatgagagtgggcacctgcacctgcgaccgagcaacaagtgacgcgataaaggtctcgatcgggggaagagcaggcaggtcagaggggtccattggaggggtggatggtggtgtaggttggccattctggttgaccgtgttggtcacatgcgcctcacagcggatgacctgggctgcctgttgagccaggtgtgtgatcatttcgcgagtcactcggacagtgacaaactcattgagagcagctcggttgagtgatgctgagtccatcttgatagagggatatgacaagaagttggatatcggagaagagatcgaggatgggagttaaatatgcggaactgagatcaaaaaggtgatcaaggccacagatagattgtctcgggacaatccaattcagaaatctttgggcaaacgacaaaggtctttgtatgttggcggtatcagagggagtcgacacagggtgaagcaaagaaatccgatcaaagaccaagagacacaatggcgaacagagaaagtgaattcctggccggcaggataactttcagatcaagtactttctttaaaaaaagaatgttgcagtaaggatgggatagttggggttgtcgtgtcaacgcctatcgatagccctaactgagaacttctccaaagtgaaacccgaaatttattcgagagagacacaatccacagttcactgcaagtaagcaatagattggaaataatgtctctgaggggggaaattcaggatagaaaaggcgaaggatcaaaataaaaggcaggtatcaaaggaaaggatgacgacgttgggcatgatgaatctcgtgaagaatctgggtggaatgcctctctagttatagtatctggtatgcgccagagtgggaggagagaggggatacggttctcccctgcaaggaacggccatccagttagaagagagaagatagccaacagggatagaacagagccaacctgcatagttggatctaagatgctacctatttttttggcgcgcggagtctgacagggaaagtgagctgatttgtcgagagagaacggatgatgtacagttgatagactattattgtacctgtgcgttattatccctagattcatccaatagagggttggacggttggtttttggctgttggattgcatcgactggctggacacgatggactcggtgtgatagtattctacattctacatgaaactaaaataaggggcgtattgggacagggcgacgtccaacaatacagctgatctaggatctagaatatgggcccttcacaatgattcctatgaaacgcatgaccgtctcagatctactccgtatgggtcattccattccataccaaaataggatctattatctagtcaatcatcaccaagaacagacttcagctgaaaaaaacacggtggcgatttcaggttggcgccgtgaactcgcgttagtgcccaatcactcgaaacctgtcagtttccgatctgatcgccggaatccctgtgaaatggtccctttgacagacttggctgtcctgtcatttgactggatcccaatccaacggcgcgaatatagcgtgttcgagggggagacatgccactcctggaggggaaaaagaaaataaaacgatcccaacctgttggaattatccgacatccacctcacatgaggcaggtcacatcattccggacccttttttcttttttcctcttggatctatcgatttccaacctcttcccaaccacccggctatcttttgcctctccccgaccatgcagtagagccgtgggatgcatgcaatgttccgtgcatagctcttttagcgtgttggctactctaaaaaaaaaggcagcacactgcatatgcatctacataagcgcccatcctctttccactcccgacttcccgcccagcgcttacaatcccaacatcgtggaagcgctatgacgtttagctctaattttatcattttctttcgttattcttagatttgtttctatacgcactacgctcctgcttttcactaccccggacgtccccatgcgcgggccgtcacccgccgttccgcctgtcccgaatttgggatgctggaagtgatactgcgcctcatttcatcgggcgtctcgctgttggtgatttggatggttggttaagagtgctctatgcaggtttccaacgtttgttcccacgggtgctcccacgatcccgcaggtgatcccaaaggtgatccgcatatccagcccaggctccatcattttatggcgccgttgggattctcagagctttgggcccggtgttggaatggggcggtttcgggattggagggtttgtttcagtgttgggtggcggctagaaatcgtatgggtgagatgcaacgcgaagaatgcgaccgtgcatatgcggagtacgagtcgcaggctgatactaatgtgtgtatttggcattatgacaatggtggttctatgattggcagtgattatcgatccggtacttggtgaattgtgattgattacatttcccaactatcttcccaagtcccagtcatgcccttcgctaaaaccatggaatcacttgacaattaaacaacagcgaccgagtaagaagaaacagtcaacttagcagtaccagtgaaaggctcagtgccagcctgcacatcaatcaagtatttgctgttgctcagaccctggtcgttgacaaggtacgtaaagaacttcaacaggtcaccggagaagctcgtaacggtcgacttggcgacgaagctgtaaacagtcatctggccattgggaccaacccacacatcccattcgacaccattgatagtaaccgtcgcgatggccttgccagtgctcgagatcgggcccgcaccgcccagagccgcaagccacaccatgatctcgtactcctcgctgccgtcagcagtagaactgagaaacatgtcgtaagcgacatcggcgacgatatcggtagtcgagtagctattcagagatggttagggctgttcgttctaaagaaaccatgtgcaccaggcttacctccagtcccaaacggactcgatgctgctaatagcactcagcgtcttaggagtgaactgcagcgaggcactggcgtagctcttgacctggttcgtggcaccggcccacgaccacgaggtgtgccacgcgatcttactgccgctgctcgagtctagccctgtgcactgcgtgccggaggggtcttgggcttcgttccagaggttgttgtagaggatgtaggtgtccgttgtggttgtgccccactgatcgcagaagtctgcgcgacgagcgatggccttgactggggccctggcggcgttgcccatggccgacagtcccaggcagaggagggacacgggtgcgatgaaggacttcatagtggctttgggatcgggtgttggtctcagggacagatgggagtatcttggtatgaaattggagtctcacaggatggaactggggttggagggttgttttatacatgccatattctctcgggaggcgtccgtttggggaatgacctgcaccggcggtggattcatgttccgtatagagtgcggaggactcctgtctcacatttcatattggtacgagttattatctccgtcgagctcatggccgggactccacaacagccggataatatcaaaagcttgctcggggccacggccagccgggattgaaggaatatattgctgctgccatgacgtgcatcgtggacaaatttttccacgactcgaggtttattatgcagggcattatctactcatctgcggattcggaaagctctccggtcgttggcaccgtacgtgaggccgtcgcagagcggggcgggggattactgcttctagaacgcggtcaaatcggaggccgttgcttaaaaggtatccgctttgttcgagattcccctgaagcataaattgtcggtttgcatttgcgaagtttttccgtggtgtgactggctttgtgcaggagccaggtcagtgtaattgatttgcgtgtcatatgtgatggtcaaatctagagacttgaaggatacatatgctgtatgtactcacgaatcagctacatcgtcacttacgcctgttcttcatgcaccccgcaaacaacacaacataagactccccagaaaatggatggtagctaactccaaaggtctcggctgaggacttgctcctagtcagagattgcgggatgccgaccgtttttcaatgggagatgatcgacattttgaccgttgaattcaagtcatgcagaaaccaaattagaatggttcttgccatcattcgacaggggatggtttcatggcaagccacgtagctcaagtatggatgttacacattcgtacgcgctcacagtcaggcactataaggtatgttctgtctagcagtcccctgcatcttcggaaattgaaaatgggccgattgggacgaggactcagacggagaggcaattgtggctaccgtcatgagcaagtcagaaaacccgaaactcatggctgtttatcttacacggtgcaatcattttgcttgcgacttttcctttcagctatgtcgtggtcatataggcaagggtcggtccgtcagcatagcgcaggtcctcgtcattttggatatcatcccaagtcaactttagataattagcttctctgatatcacacaaacaattcaagcttggattcgatacattcatcgatatacggtggactctagtcgagattagatatgtatgttgtacaatgttcagaatatatatatcgtctcaatccaggtcaaacctcgggatacccatctcccatctctttatactgatagaaacagtcaaactagccatgtgtcctagcatcgacagtccgtcatatgcaagcataccaagttcaatgtttaagaatctgagcaacaggatgacctcggggagtagtttgatatatcttggcatcgggttccgcggactgcggcagttcccgcatacggatcacggcgatccgaggtgagctgtcattggagatgattggactgtcctacctgacaggtgcagacgtacggaacatcgtcggggaaaggagatatcgaggacgcttggccaatagaagagacgataattcggattgtgggcatccggcatggcctgttgatgtaaaacaaacagtgcaaacacatacaaacatatacaaacacattcaaacactacaaaccataggattgcaatatcaccagcatataggtgcatgtattgacttaagcatgagacaatgagcaaggaattgactgatatacagtagtaatgaatcgaacaaaagcgagggcgttttgactattttcaattgttttgcttatatgccccactaagtggaactccggggatttcgctagggggtggaattaaatttaagtgctcgcatgcctcttttttcaaagactccaggtcccttccccaattcccaagatgccttctaaatcctcaaagtcttccagctccggctgccgctgtcgctgcttctccctgaagagcctcagctacctggctatcttcctggctctattctccgccgtctaccgataccttgatgcgcgcctggagcaattctacatcttcgacccggtgcacctacacgatgtatctcagcgcgctatcagcgcccacggcgaagacacccgctctgtcgtcaactttatcgtcgccgagctggagcaaaaagtcggtcccaactacctaagcacccaggaggagtgggttttcaacaacgccggcggcgccatgggcgctatgtacgtgattcatgctagtatcacagagtacctaatcatcttcggtgagtttcgcgcccgcgatcaagtctactgcattccttttcccttctaatcgcattcaatcttcgcaggcaccgctatcggaaccgaaggccacaccggccgccacaccgccgacgactacttccacatccttcagggcacccagctcgcctactcccccggagagttcaagccggaggtctacccggccggcagtgtgcaccacctagtccgcggcgaggtcaagcagtacaagatggatgaatcttgcttcgcgctcgagtacgcccgtggctggatcccccccatgctcttcttcggttacgccgataccttctccagcaccctggacttcccgacgttatgggctaccacgcgcatcacagcccgagagatggtcggcaacttgttacagttgaagctataattgagcatatgattttattattggcatgcagggttcagttggattgatgaggtctatgtggaatgtatgatatgggaattggggtgcgatcctagcacctgaggtgctattttggtaaaagttagtagatatagtggatattcaattgctagcaccgagcacatttttaataacatcatcagctgactgcccttatgacacaggctattagacttgagctgtgacctaggacgctttgcccaggctgctgccgttgaaaagatgttggaagtatggaagccaatattccaacgtcgtactaatcatcagtagacggtgagagacctgatgtcttaatcatttgagaagatccccaagtcctgaagttcagtactacttccaacgacggttcactagagctacggaggccgtgatcgaggtcgaagatataccgaggacgagaatggaaataacagaagaaggctgagataagcctttataccttgtttgtcaggcttccacaggcttgggccttagttaacagccaaaaacgtatctttgttaggaaccctgcacgaacaagcctatcatgagcgttgacatttgcctaggctactaatatgcatgaatccgcatactcgtatgccacgtcacagagagcactcagccgatgtgtgcgtgtgttgctagcttccaagtgttccatcgaaactacgctgaccattcccatttctctcactgatgcaatcttctaacatctgttactaggccatatgctcatggttgctcgagcaaaatgataccctcgaaggaatttcatcaagcagttcaaaacctacgcggactaacggatcaaccatccgaagaacactcttatcgaatagaaattccaccttctcaatcagctaagcacttgctaaaagctgaggatgagatgcaacttgccgatgatattgccttcctaggtcaggcagaagagggagccaaaaatgtgacggctgtgactctccaggagaaagcacctgggcttgtcatttgcctcgcgagcaaccacacgccatccgataaaagagttctggaattgaataaaaccatggctttggtgagcgagtacgcttctgaaggtagctccttgtatgcaaatgtcatattcagggttgctgacttgtacaggaaagcgacggcgtgaatttcgtgacaaaatattcgacatggttgttgacatccgcgaagatcgaattcttagcagaattcgtccgccatggttaccacagcctagccgctattacaaactgaggccgtttctactctcacaggttcaggtatttgttgatgagatttccgttatcaatcgtcagtcagcaggttttcaatctctggtgcaaccggcgcgccagctgatatcctgccttttacctttcaaaaaacctgttccacagattttgagaaaggaatatcagaaaaatgtgataaaaagctgtgctgaattggctggtgttggtgggacaggattgctggaggaacaccttcagcggctacaaatttcagctcaactccgtgatagaggtggaatacgtcaaattgacaagcttgcgcgatacttctttgtgtgtcgagatcttgtcagagtcggtagacgtccagagtacaagcccctgttcagcaatattgcgattgaaaccttgaaagcttccaaaggaaggccagtaggctccaaagtgtgctttgttcacgcagagatgcagcagattgttcactacacgaatcatcctcatgatcctagtccgcggtttatcggatgtagcaagtccgcatgctacctctgcgatatgttcatccagaagcatgggttataccgaatctcacatgctcaccggcggctttatgacctatggacactgcctgatttggattattcggcttccaaagaggctcaacagcttcaagtcatattaaaatccatgaccaaggagatttcagccattgccacagggtttcaacgaagtcctcgtcctccgaagcagtatagagcggagagcattgcattcttacctcttaccagtggctcgacagcgagcaatacttcagttgccacgcagaaagcttccatgtcttcagtatcccccctattgagtcttaagtcggactctgataccaggattgcgagcacctgcttttcgaagagcctgtctagcagaactagcaatgcgtcttgtcttttactcaaccaagatgacctgccatattcacttgatataaaagacatcaaacacgactttttggtgcagatcggtgcaatctttcttgatgtcgagtttgttaccactggccggctctcaatccgccacgcaatagataatacactacctaaagatgtcatagatatctctcatttatctacaattagtgagacaaaggtggctcaaagtctaaccacgcaactatccttgcgtcaccctagcggttttacgataattattgactttgtccgggatgaggttggacttgatcatgaaacagtcattcctgtgcgtccggatgactaggtctattgaaggttacaattcggaatactgtctatatagcctgctagtaacaataacatggtgaacctctatcatgattggttacaacgagtctaaatcagcctttcctcggccatgaatcgcttgcaaatccaagctactcactcatctccccaagaagatcctgcgcattatgaagcaagattcgtctcgttgtctctgatccaaagacactctgcaatccatcatccactctcttagccagagactcagccaacgctgcaggggtataggggtaatcactcccatacagcaatctagacgaatcaaccagccgcagaagaccatgaatctgatccgggaatggcacacccgcaagatcaaaatagaaacgcgtccgtaacagctgcttaatcctctccccactaatcccatcccctggaccgggaaccatggacgagaactctgcgatcctttccattatcggaggaaaagtcgcaccgcagtggcaagacacaaatgtaattccaggacagcggtcaacggtcccagaggtaagcagactcatgagtgccctggtcgaatcgaacataaactccataataggcgccgagaccccagggagcggtatctccttctccagggagtcatcatcgtgccggataaaacatgtagttgggtgaaagaaggcgatggtctttcgcgcactcaatttgtcaaaaacccgggtaaagcgctgatcacccgggtagatgccatgcgaattggtcagaatctgaaaccccactgcgccaagatggtccagtgcatagtctatttctgcaagggagccttccacgtctgggagggggagagaggcgaagaagaggaagtgggttgggtgatcggcgcagattttggacatgtcgatgttggcccgtcgggttacagatcggccttcttcgtcatttcctggggttaaatgtgttgctggagaggacatgctcagcactgatttcttgatttttagctggttcattagttcaatgtgtgcttcgggactccattcctgaattcttgtatttagtgtgaaagttagatggttgttcccgttcaggcactcactgggatcgccggcattccatctgggtgacctctgcccgcgaagtcgctctgtaggcaatactcgcgataagagggtggtacgcagtgggtgtggatatcgattttctccattttcgatctggtgagtgtatagggagtattttctgggggattgttgctgagttcatgtatgcctgccactgagatcgacatgcctagttcgtattcttcaccggttgttcaaacagtcacttattggttactgactcgaggcaacgacaaggaagcatgtcgtgtgaccatctccttcttattgccaatgctgtggaacaatgaaaccaacagcctggtttggcaaactgtatatctttagaccgaaacgaggtctagactaatgactatatcaggtctactttcggcagttccttcggtacgacaatcaatcccctggcagccaacagccgggcctgggtgagcttcaggaaccgatacgtgttatccaagatcggcgtgtgaacacccttctccctcgccacacgcaaagcattccccagaatgacctccacctccatgggatttcccttatccacgtccactagcatactaggccggaaacacaactcgagaggagtagcatcaaccatctcatccacaatccccgggccaaggtcatacccatccgccttcgcaatggccgccatctccgccataccgggtcttatcaaactatactcgccgccgaatagccggactgcagcactgtcaagctgagtgagagcgcacatgggattgaaaatcccattccaaagcaccttgcgccagcgatagaagacgatgtcatcgacaacattcgcatcgacgactttgctgctgttataaatcgtcgcaaactcttcgagcttggcgcgctcaaacgccgcgtccacggatgggttgcggaatgcgccaatgtggaatttgtcgtggtcgtcgtgtaccacatgcccgttgtgttcatgtgcgccgatgaaactcggcgctgacaacaccacgttctcggggaatgctgcgatgatcggtggttcgatatacagaccgttttggaataggacgatcgttgtatgacctggagttatggctggagctatgatcttgggggtgttgttcacttcggggatgttcttcatcgtgacgatcacatagtcgaatggggcgttgggatcacccaagggaaccgcgttgacgactatctatgtgttagcttcgactggaccgggcaagctatttctcgcctcgcgactttgcgaggatacatacttgcgcttggtctccaggctgatagttttccgtggtcgatagactcgatttcgaatccatgcttgacgacttgttcatagttggaacgaagaacagacgtgacagatgcctgaccggatctttcgagggcgacgctgaccatcgtccccacaccacctgatccaatcaccaacactcggcgctttgccgtggtagtatcggacatgtttgatgattactcttgaggagacagtgtcgagaatttccagtcgatctgctacagagttaagataaaatgggacatttctccaaatacaacaccccaccgaggccgatttatgcaatgcgggaggccgatctcggggcatttgattatctcggcatctcctgatcttatcgacattctaccgctcactggatgacaaggccgagctcccttcatggcccgatttggttattctgtgacatttgaaatgagggataaactatacaagctaatgttccaccatggaacgcgcaaaccatattcgcagcaactgatcggatgataaaaagtgatgtgaaatgtcgaatctttcaaaccaccgccaattatcttccatgtatccccaaagcaacccgagatgaagaacctagtcaagcaaatccgattccccgcgctcgaggacatcctcagcttcgcacaaaatgtcgcagaaacctcgggccgatgggtcaactggcagatcatacggggcatgcgacatgtatggtgggagacggactgggacgtgctatcccgatgggcgcaatcgatcatcgaaacagaagagcgcctgcgcgaaatcacccaacgcgagacgttcgtcaagaagaatatccatagattccacaacggctccgacgaagcagccaaattggttctgccggatttcatcgaagagctgatcgctctggaccacgagtacacgcgcctcgagcggatatacgataccctcctagcgggctgtcccgtgggccctatcaagagcggatatctgtggattcgaaagcagccgcagtggcatctcaggaatgagtggttgcgccaggattgtgcgaggcgcggtgggtgctgtggtcgtcagtgcaaatgttgtgagaaaccgcccgatccgatgaggaagaagggctggggtcattgtacggcgaagtgtgcttgttgtaatgatgtgcttgaggacggatttcgactgaccgagagaaatcggagaacattgcagccggagtttgatcttactgtttacccgtggagtgattatagtcgagagatgtttcgtgcttatatctggtcgcttgaataggctttctaatagtttgctttgaaagggtgttgcttgaatgtccgttgctctgtataatcaaatgccgctttcctcttatcaatgtcctagaatagaactagcattttgcaggggttcgagacttagcttgaaacaaaagtcgaagataccatacctagagttgcaggtccatgcgaatcaaagataatcaaatgatcagcggggaagcttcctaaaatctcgccaagccggcatgtttaacgcatcctgattcgaccgagtagttaatatcagagccacttggagagtacactgggagtttccccgcagatgatattcacacttgataaggcggatctgcgtaagtgtaaggcactgattgcttaaataggcaggatcaccttgcccatcatgctcgctcaagtatcctttcctacagtatccaactctcaactatggagagtgacagtattcaggatgagaccatttgggctccaggaacagtcaggctagaagatagtaagtgaccgccaaccataccgatacaacttgacttacagagccagtccaccaatccagagaccaactggtactattccccacgccatcagccgaccccaacgatcctcttaattggtcgacagctcgcaaagccctcaacttcaccctagtaagcttctttgtgctatggacttttgtccaactcgatatcggcttcacagcatggggcccaatgcaagacgagctcaacttctcagtcgatctactaaacgccaacgcagcggtcaattacggcggtcttgctataggctgcatattctttatgcccctggtccacaagtacggccgacgcccaatctacatattcagcgtggccttacaactcgcatcatccatctggcaagccgagatgtacacgatcggcgatctaatgggtagcggcctgatatccggcatcggcggcgcaatcagcgagatcgttgtgcagattaccatcgcggacatgttcttcgtgcaccagcacgccactatgaacggctggtatgtcgtcgtccagtgtgcaggagcattccttggccccgtggcatcggggtacatcgtggtggcacaagggtggaggtggatgtggtggtggtgtgtcattttcttcggtgtcacactcctctgtgtggtattccttttcgaggaatcgaaatatgtcccttatttggatggtcgggagtttaccgcggatgtacaagtgaccgatgaaccgtccaaatcacgcaaagatagggacgcagcagatgcaaagagcgccaatgagacgatcgctagccccgtacataccaacccggatattccgatgaagacgtattttcagcggatggctttggtgaccatcaccaacgaagctctgtggccgcatttttatcaaccaatcgtggcgctctttaccttcccggccgtttcatatgcagctatcacatacggatctatgctgagctggttcgcgatcatgacttccttacaggcatcgtacatgatcataccgccttataacttcgatgccattggcgttgggctgatgaatgtggctccatttgttggcgctcttctaggtttcccctttggtggacatttaagcgataaatctattttatggttatccaaacgcaatggcggtatttacgaaccggagatgcgtctttggcttgctctacctcttgccattattggccccgcggggatactaatgttcggtttgggccttgcctatgtgagtatatccaaagcatgccgtttgaacattctaacgttatctagggtgtgcactgggctcttcttgccgtgggatttggattctttggatttacacttgcttcaattagcggtatcaccctctcgtatctcatggattgctatcaagacgtgagtactgatcttatttcgagcgtttgggtcctcttctaatttgagcgcttctagatcattagcgacgcattagtcggagtgatttttatgcgaaatatcttctcggtggttgtactctttgctttgacaccttgggtcgaagggatgggcttgcgagacttgcatattctgcttgcagttattgcattggtggtcctgttgattcctgttccacttcttgtctggggtaagaaggctagaattgctacggccgcgagttataggaaaatggcggcaaatcagctcagccaccggactacttagataccctcctactactagaataaattgcgactcggctttcagttgaaggagacgaccttgacaaatattaagtaatgttataatttagacaagcccataaaaataagactaaaggtgtataatgttaatgaaggtatcacaaagaagaatgtaaacgagtgtttcaatgtgttcctgtttcgcctgactcccccaccctatgcaatccgcatagagccttccatccagcgaaggagtcccagacctagacgctttccctcggcttctcatccttgtagtcttcatatcgaggcatctcaaatgtttgccgaaccgcataggagacactttgcttatggttggaagtgatagtgcctccaggattgctcgagaccacaagagtcctgtcggacagctcggatacgttgttggaggcacgaatttgagaccagaagttgcgatgactcaacttgaacaaagggcggaggttggggagacaagcagccgtgattccgactgctgcttcgatacaggtccacacgatgacgggaacttggttatctgaacatgtggttagagatatggatcgagagattgaaagaatattggcacggtcgatactcacaggtaatatcaggacctagctcaaccagtcggatcatggcattgaggcggaagatatcgaaaatcaaggttctagacatgaattgttagtattctttcactgtagcgcgaatgggatatcaaacatacaagccaccgacgaggaatactccagagagaagcgctttctggccgtttgagatcggtaatgtccacacgactctcatgggcatgatcaagagaatgatgtcggagaggatgttggggatttggattccatagtagaattttgctgggtcaaggcaggctccttcaaccgactggtcccagaaccttttgacggggatacacagaagagcacctgcaacgtaaacacccacaacccagagagtgacgaatccaaacatgatgttcactgcaattgtcatgtgtcggactgcaaagagtcgcctgtacagtgccagaatggagtatttaatgaaggcgatgcagccggtgtagataaaggcattggcaaagccgagctatcttgagtcaatgcgtgtacttgatagtaatagggctgagttacgtacttggaagtaaaccacgaggtttttcgctgggatcattgtgatgtgtgaccccattccattgaacaggactaatatggtattagtatacgttggtttaatggggattttgattcactcacgaacgacgactccactggagcatgcatatttaaagaacagagcaaccataatcaagtagtcgtccatgaaaagcctactcccagtcaccttcctcgccaggatcctgagagcaacggagagagtcgacaacgtgtaagcaaacaccagggcaataatcatcgaccggcgtaactcctggttcgggtgttcgaagtctcctggtgtccacgtggggctggaggaatctggggaagacatgacaggcaggtatggtggatcaactcaaacaacaaggtaagattaaacgagaggaagttgttggcttgaatgatttggaatcatttaaggctgcgtttcggttcctttaatatacttcgacaagatgaggaaggggaaaagggatctacgtatgtagcctggatatgtcatatcttttgacatccacgaaaataccgcaaagatgatatgaagggtataccgatcacatcgatgacagggtatttgctaggtacggaaggcagttcagctcaggcaccctccaatgcgaacgactactgattgtagtgtgcgactattttgccttagaaaaagctagccgatgttaatcaacggcccgtcggatcataaagcaacaaagcattgtataccttggccgtggagatttcaccaatcatatggaggccaaagaaccctttccggacgtatcatcttggaagagtggatatatcagattcggatctgacactcatgagatccactttatgcaagttatttttttccgaaagcccggcgaatagatgtgttgaacaaaatgacagcatgttctagcgcattacgtctttgatcgagataatcactagagatatgcgtgaagaatgattgttcattgctttgcagtcaagttctcatactagaagattactcaacgaagttcggaattcatcactatatttcaagcaagggattaacaataaagaagtctacgcagttttgagatatagataaaccggggctgagtttcccagggctctatcgtaggagaattcagaaatagagacatacacggaatatctggctttctccatatgtaccacgcccaatgtagccaaaaacgccgaaaccgccatgatcgtccaataattgaaaacaatgcgggttgggccatagaatacagatttgaagccaccgttttggcagatccacgtataatgagacagttgaggtctggggttgacccgatatgatatgtctaaagcacagcagacatatccgattgcggcccacatggtggcatttagtggaattcagccgttatgttggtccacatgacagcgcttttgccattgattacgaagttgatatacgtctcatgcagctattgcactgccgttgcacttcgattgcacatctgtacccgcttttcctggactgtcgcacatgaatacgatgttaaatgcgatctcaattggaatttaatacgttgttcatgcacagttttgtgcaacatatgttgtacagcctgattgtcgatggaagatgttatgaatccactttttactccgcacagatatccccgatcttcgcgaggggctgtatcggagattagcccgatcgaacgtccgactcttcacagagctgagagcatgtcattggaaggtccacatgggtatattacgtcttcatagtttatgttcacccttgccgttctgtggctcaatgtcctcgacaaagttcgacggaaagtctaacatcccggatttgcaatgcctcaaatttatatatactttgatcgtcccggctgactctaggaagcaggtataatccaaaacagttagcatattccaagctatccacactacgagcaaggcacatacccatagtaacacgtagggccattccattgaacagcacacgagggaaagtcgcacacatatttgtagctgccgtggtccagattctgacctgcagctttattatccgcaagggtgacgacactatcaatgtttcagagccgcaatgtgtctttccagggttgcacctttccatgactcgggaagatccctgtcccacaaccctttctagtggtatcattggatgctgaggcaatgtttgctgcgtctggctccactacggggctacggtaaagtgattacccttccggtccaattgttgacgccgatagcaatcgacttgggcatggacccttccaataaacagacgcgatgctttagatgcacgccatcgacgattagcgtcaagccgcaggatcgatcgaagaaatgcccctcaccagaaatattccatctccgaagctctcccactaaaatatcgttattctagtacaaatcctacgcgatcatggccaaagtcgctcttattaccggcggtagtatgtagctttctatcctcggatcattcattcactaagtttattgaaaaaagctagcggaatggggcttgcagttgccaaggacctgagccagaccggcagctggcaggtcaacattatcggcaccaaccaggagcgaggccaagaagcagcagcttccttgttaaatgtcacattctaccaagccgacgtgcgcaattaccaacaactagccgctgtatttgaccagatcttcaatgccactgaccgaatagactttgtcttcgcgaacgccggaagagcagattataccgatttcttcgctaaatccgagaccggcatcccgcccgaaccgggttctgaacttgtcgatgtcaacgtgaacggcgctctatataccagttaccttgcgatgcactatttccgtcgctctccagagttaacgaaagggcataggaatttaatactcatgtcgagtatcgggggactgtacccctgcatgttgaccccggtgtactctagcactaaacgtatgttgagaattaacaactcgaataagttcgccatcagacatggctaataagttcctagatgcgctcattgggctcactcgctctgtcggagagcgactttgggaagatggaattcgggttaatgctctgtgtcccggggtggtggaaacgccccttcttgccaacgaggcgtttaatgcgatcttcccgcgggaaatactcattcctatagacgttgtaactggtgtggtatcagagctactgtctggggcagatatggtagacgccaaagggatgcgtgtcgctggtgatgaaatgcattcccgggcgcttcatgtttcaggaaagagcttccttttcattgagaagcccgagtttcatgatgcgcagtctcggataacttgggctgcaatgatggggcataaataattggaagcataaatgtacgagacccaatgaactcgagataaggtcccaagactgtatgtcgccgttttaacatttgatcgctctatatcctgcctatctggttccacagaattcacgttcaacactcggaatgttgaaacacctgatgcacatgtttaaactcaatttccttgcaaatccctggcaggtagaagatcccccatgccataagaacaactgccgtctgatagtagtcaaatgcataactgggccactcattgactgccaaaaatccatcggatcccatcccaagctgtgtcagtcgcatcaaattgcgaccaatagcaataatcgagattgcaagaccaaacaactgattataaagtttccaatgaggcatcatgagttggatattggcgaacgagggtcgtccaaatcgaacagtccagaatatattctccacaagagtgaatatccaaaaaaccatctggcatacataactcgccgtgagaatattcgctgcagactcaatgagtgtagccttatgggtcagagcaagaatcatagcaccggtgccctgaagtagaaaaaggacaatgttggaagcgaggtagatagggagtcgtaattgggtagggagcagacccagattctcggacttcaaacagcgcatcattttcacttgtgtgagattgacggtaaacatgcatagcgttggtccaaggaggagaaacagattttgaacgccgtaggctccaaagctataggcatcttctgaggagaacactcgagcccctagacccattgcttgcactatggagtggtgagcgggagaatatctcaatcgggctgggttgttccttacccagagctgctaccagcatatagctaccatcccatgctcgagagcgacacatacggaccgcatgcgttgcaaacagggcgcaatatatacccactccaacaaccgcaggaatcagacttggcgtataggaataataggcggttgaagacatcatattaggaaggatatatcaaacaaagaccaattggctcttgaagatgtaagtaagttgtaatgaaagcgagcatcactgaaaaatccggaacccccatggcatttataacattggaccccgagtaggggaccaccaactcgatgcagatcagatctaaaccgagtaatcataacatagctctttatggcagcctaggggcccttgtgaaagattatttctacgacgtgcaatgtctcggcgaagggtcgggttcgtactcgggttcggaaaggaaaggttaatctaccttatttcctggcatttctcaaggcaggtacattatagttggggctaatctattctcaattgtgaaggcaccaatcaaacctatcctttttgctactcttttctaaaagaggactacccagtatgttagcgtctcaaattagtgacatactcattcttcagtaatattgaagatcaagctgtttaggcatgagatgatcacctccttccaattaaaatatactataagacaataattaagacacgctcctgtcgtgcagcgaagaaaaaaattgagatcaatctcagcagttcaaatcatccgccatgcgcctccaaacagatttaggcagcctcccatgaatccaataaccaccatcattcccatcctgaccccgccctttccacgtcacaaccaaatcatccaagtgagtcttggtctgtcgcagaagtccgcagtagtcaacacttccctgtacaaagagcggacactcgccttcgatatcgagaccatagagcggtaggcttttccaagaagcgatgcgtggttgagccgcgcggctgccgtatgattttgggaccatgggtcttttcgtcgggtttttgtgctgagcgattatctctgcgatgcattctgattgctgcccttcgtgaaccgcacgccgaatgtgtgttgccagtcgaaccaatgaaggagagtcatattcgcttgttggtattggatccggcaggggcatcatgtaccaggggttggaaagatttgcctctgactggagttgttttgagatatcgatggttaagccgaagttgtgggcagtgtgtaagtgtaaagaagcctgtgcaggtattgtcttagtgaacttctccaatttggggcaaactgtatgacaggtagcatcactaaccttgtagataaaagccagcaagagatcatgttcagttaccttggcctgtttactttcggccgcttcaatccatctctggatttgccctcgggggaccaacaaggtcttgccgatccgtctcgctgaggggtagcatatatttcgcccaatctgtttcccgagggccgtaattcctgctatccaagtccgattcatggaatatttgtgcagatctgcgatccgatgacactcaatcttctccacgcatttttcgattacttctgttttcagcggcaagagtggtcgggcatggagactgtgggtaattttttctcccctgagcaggctacaataagcctgaactatttgatgagcacctataagcacctgtcagctctactggtttgtgctttatgctttctaaggcgtcaattaccatttgcatcgcaaagaggctgcaggaacttgaatcctattatgcaggcatcggtcaagaacaccgttcgtatggagaatacgcgctgcctccatgcatgcaagactccatacccaaaatctaacgccttatcgaatgcctcggagtcaatcaattgcggtgagtccggcttgggggaaacttggagaatctcgctgagctcttgcttaagaattttccctttccacacttcggctaggtcaccggggtctttcggatccaagaatttcgttttctgtttagtgttagtatgattaacgaccgtggttgacgttaccaagcacgtaccagcggatccattcgcaagttcagtacaggccattgtgacacgagtgtatcggcggcgaactgaaagtcgagcgggctaggactggtcctcacaacgattgacagagtgaactcgagaggtcgggcatagcccatatccagtggacttggcttcataatgaaatttacaaaaaaataacaaaataacacgagatccagtaaccatgcttatcaagccgacccaaaggttatattaataataaatagagacagagtgaggccgtcacggaaatcaacatgtcagtatctgcatattgatctgttgaccccaactttaacgtctctccccacataattgccctctggaatgccaccctgtggatctcctccaatgagcttcctgacatggaattctgcaccatggtagagacctctctggaatgttgtatgtccccacacagacctgcgtgtcgctcacaattgcccaaacttagcagcagtcttgttagaggagattggaaatgcgcgggcaggttgtccaccaatcgtagtcgaaggttgcagaaatattgactcctgtcattccctatacgaattccagctaatatcaagtatgatgttggttgtgatgaatcgattgtctgatactatcccgtgatgatggataccgggatcagccgagccactagccggccgttacatttttttacaaagttacagaccattttagtgtgtaacctttgtaataaatgtaacaaaccggttaaatcgtgactagcgtacggcggtcgaaaccgactctcctggcaacttcgaacatgcttgaaagttgacacctttggcacctctgaatggcttctctatctctgcctccacctggttttgacgtcggtattgaccggttttccagccttcctgtcgagcttctcatttgcatttcctcttacttgaccaatcgcgatctcaagtctctacgcttggcatgtagactcttggctcaagtcgctcatatccgtgtgaatcgtgtttttctctccgccaacccatgcaacatcagagtcttccgcacaatcgcagacgacgaagagttccggcatcatgtcaccgagatcgtatgggatgatgctcgttttatcgagggcccaaagccgcatccccaccccacaggggagattgatgaggcagacatagaccctgaccaaggatgcccctactggtttgtcgcggcatgtaaagagaacatacatgaccgaaatgtgcggaagacctacgacatagtgcggccagatgacgtcgcacggggaaaacaagttattacgcaactatcgctgaaaagctgctggcaattttaccagaatttgctccagcagcagaaagacgttcttttctcaaacagcgatgtagacgcgtttatctacggaatcgggcgattcccaaaattgaaacgaatcaccatcactcccgcagcgcacgggtggatccatgccccattatatgatacccctatgattaagtcctttccgtgtggatttaactacccgattccacggggatggccgacgtcgagagattcgcagattccgctacacgcccatccatggagagaagccactgaggaccggaagaaccaatggcgtgcattccgaaacgtggtatctgtgctcgcaaaaaataagctctatgtcccagaattggttcttgctgtcaatcagcttccgactgggcttaactgtactatctttgatcagccatgcgaggaatacgacaacctccttacaatactgcggagccctggattttgtcgtctagatcttccacttcttgtgggtgggcaagagcacgaagactggctctcattccggagcggttatcttaagcacgctttgtccgaggcaaagaatatgaagtacttcagtcttagaacaacagttgacaccgatgccatacgtgacatctcgggcaatcccacccacttcatcccactaaagactatcctccctgtggaggagtggccagaactccgttccttcagattatcgggtttcctagtgaagcagggtgacatgataaatttcctcgctggactgccgaagaccacatgtgttatcgaattgagtttccttgaattccttgatggttgctggcatggtctgctcactgaaatacgtgacacattatgttgggaccagcgagacaaggaatcaaggcccaaactcattattggtatagcggactcgatgcgcagggcaggatttggcatctggctcgacaacgaggtgcaagactttatttatggagatggaccgaaccctttttatcccaactatggcgactacctaggagcaggaagagtgggaacctgccgggatacatttgagccggggcgtccgcggcgtaatgtggatcgttttactatagctcggatggggtacttcatggcagagccgttcgctgacatgttgtagtatgtaactaactatagtctgctccatcgtaccttcgaacacatacacatcgttcggatccatatacaatgaacgtggcattgggaagaaactaactgataaaccgcttggtagaactatggatagaagaagttgtaaactgataggatttagactgtttctgccataagcagcagatgtgaccgcaatccgttcaacacaatctcgacctagaacttggtcctacgacatttgtgaaattgcgagaattgctaaggacaaggacaaattcttgactccccttgaacaccttgaaccttgagaacagaaccacttggcgaaatccagaaagcccagaaaacactaaagcactattgaccagccagcctctttcatacgtctcacgcgaaatttctcgcacgactcttttgtcgcgcgctttaggttctatatgactgatgaccaaccctctactcaatctctaccgtcaaacactattgagaccaaagcagcaaggtcctcgccaagggcctcgaaaccgaaaccccaaagggacagcagcggaggtggtgtgcggagaagtacgcggctgcaacaacgcgataaacaaaccaggcggtagttgggaacaggcccggttaacgaccgaggagacgactgcctgggactgcgactaggattctcctaatctccaccaaatggctcggtcgttcaagattattcgtactttgtttgcattctcgcaggagcggaccgttgggactgcaaagaggctaggcgttgaggagaatgagagatttttttttttgctgatcggtcgaagctttactctctgcgggtggctaagaagaaatatatggcctttttgctctgttattccggtagggaaagcctatagcgcacctagataagaggtttcaacatgaatgacacctgttgctaggagtgtagagcatagtaccgtgagcgacggaatcgttaataagtttgcttgttggaggcaaagattgacgagtgcttaatgacggaagttcatttgtgtcctttgcgaatcaaactgacggaggtatttggtgaaacttggaagtaaacaaaacgacataataaacaaaacaaacaatggcaagataacaaaacgcgaatcatatatgctcatacagaggcttcgaaacgtatatataaccatcaaacgttcccatcttgaggtagacctttctccgtcatcagcttattcagtgttgcggcatcaatccgctcatccatgtccgggtccagtagatcttgaacgatataactaagcgactcatcttgctgatctagctttagccgagcagccttgaccaggtcaatccactggagcatcgtatcgacagctttcatatggggtgactgatgtatgttcgtaatcaaccaatgcggtgttttctcaggcaagggaatgtggcctaatagccagagtatgacaatacccaaggcccacatgtcggatggcggtccacgtagcttccagtctagcaaaaactctggtggcagataccacggcgagccaccaccgggcgaaggattgccatcccagaagctgaggccgaaatcgatcaaaatggcaccccgatcagggctgtagaggatattgcctggcttaacatcgttgtgaacaattttattgccatggataaaagtaagtgccgaggccatatcagccaggatcttctgcgcatctgaggaatctccgatgaaaatgccactggcttgatgccgctgacaccagagtgattcggcttcgacgtgctcagtatatatactgtggaaccgggcgtcagatccgagcatgcgaagtatagccgactagtgagcagatcagttctgggaccaaatgaatggaacgaaagtacatacatgacttttgagagaagagtggatcgccgattcatgtatccaagattcagcagcccggattgcgtccctctcgtttctgccggtggttttgattactttgacaaccatgagcttgcctggcatacccgagtgctctgcctgccatacagacgaatttgcctgctctacaatagtcctgcatcgcgtgagccgatacccttcgtcgccagctccgacaaacatagtatcgccttttgcaagcttcacaagtgcgttaccagctgaaacaccctgcataccacgcgaaggctcaatcgctcggtatgtggattctctcgatttcaccctctttgacggtggaaagtcggatcctggcgcaggtcgtttagtggccgttttagcagttatctcccatgaagtccgcgggagtatctggaattcgacgagagttatgccattgatctcgatagcacaggaacctttgtataaaaaggcagggtctctcggcaaaactttcatagattccttatcaagccgcacgtcgagggtttcgaaaggacaggcattgtggagaatgagacgatcctcgcctggatccaagtacaagtgaaatctcatatcatgatgggtaagggtgcacccgacttgctcggcgttcggagccacaacgaggaccctggctgactcgcttttctctggacagtcacccagttggacttcgacccagttgtcatagcgcccggctcctttgtagggagatatatcgagctcaatgaccctgggatatagaataattctagctgtcggttcgttggacgtgatcgagtccagacgtagcatgctgaaatccaagtccatggattggtttcggcttgtttctagataaggataaggaggcgagaatgtctgggttggttctgtcaagctgggatgaactctcgttgagctagggccagcctctgtcgagatgggaccaaccgtcgatctaggatcaacttcagtcaaaggcaacgtagccacttcatcctctctgggctcctcagtgtcctcactttggcctgtctggccaagcttccgtttagacttggaattgagtgccattccgggaccgagaagctgctcgtaagcagagtatagaagtttgccatattattcgtattaccctctgatatatgtatgccgtgatttgcaacagaaccgaagcgccggcggagcgcccacggaaataaaccaggcacatatgcatgcacaatccaacttgccgctaggtatagtagaccgagattgagggcctatagactaaatatagccgtgcatggccatgtcagcactaagcttgagcgtcttagattggccgaagcccatggctgaggcgccaaactggtttcgagtataaatagaatgtcatttgattctgcaatgttaattcgatcgagtccaggcggtgagtacgttgttctccgcccttttagtgtggggcccctgggagggaatggggggcttgcccatatcataacataaatcagtaactatagcaagagatattatctttactacctcctccatggctaagcggtggcatcggacaatagacactcatctgggggctcatactcctcctgacccaaattattacgaaaaaacgtggtgctgggagtcctcgagagtcggctacaaggatcccaacgttctttttaccacactacatgaggaatacaacactctaaagtgcgcgattcaagacccggaggcttggcatcgcgacgtctcttgcattgcgagggcttcgaataacaacgatgaattcctaactctgcttaaacagcgacaagcagagaggtttcacgagatccagacaacctggcaaaagatcaaaacacggttaattacggatcctgcacgttgggacaacccgccaaccaaagctgttttatggagcaattttctacaatttgctcgaaatttttcatacgattgcctcgtcacctgctttggcgcctacgcgactgatgcccaaccctctgctcaacctctgctatcaaattccattgaggtccacccttctaaagtgcaaaagctcaaaagagaaccaaaagagaaaatggcagcatcctctggcgtgaccaagtcctcgccaaaagcctcgaaatcgagaccgaaatcgagaccgaaacgggacggcagcagacaggacggtgtgcggagaagtactcggttacaacaacgcgctgaacaatccaagcgacagtgtgcaggacgcacctctcttgaggaaaaactgaacaaggctgaaagaagatttgcttcattgcagcctggaattgtggactaaggccactgttcccagggaatctctcccctcccattgcattgggtgatacatagtcctctctagtatgcccggtcttggctgctatgcatcggatatgcccagtaggatgggactggttcttttgtttctgccttggccattatatacgtttacactgtgtccattccaagcatgtgtactttgattactttgaactatcagacctgttggcgtaatgattctcttgacaaacagcacagattgactccgctaaatgaatttggttttataacaattcttggtttataggcatctaatgacatagatcaatgtgataagtggtgcagtcatctcgtaccagtctgatgatattaaggtaatcaggctactcggcgtaaaaataagatattctgacttcatttaagccgtttaaccctccagactggcaaagaccgaggatcgagataatatagatctaaccatggaacccacagacttagcgccctgtgcacggaccactcgatcgaccgcgggggaaaataaattcttctccgccaccaactcacaggcccaaccaattcatcatggcaccgacggcgtgtttcaactgcaaagaggcgcgagccgtcatcatccggcctaagaataggcacaaactctgccgtgcgtgtttcatcgatattttcgagaccgaggtacacgaaaccatcatcggcaccaatctcttcttccccggcgagcgagtagcgatcggggccagcggcggcaaagacagcacagtacttgcagcagtactaaaaaccctcaacgagcgatataactacgggctagacctatgcctactgtcaatcgacgagggcatccgtggttatcgcgatgacagtctcgagaccgtgaagcgcaacgccgtgcaatacgagatgccacttgatatccttggatacagcgaactctacggctggacgatggaccaggtcgtggaacaagtgggcaagaaggggaactgcacgtactgcggtgtgttccggcggcaggcgctcgaccgaggcgccgcccgcttgggcatcaagcacgttgtcacaggccataatgcggatgatgttgctgagactgttatgatgaatctcctgcgtggtgatctaccccgtctgtcgcgcggtactagtatcgtcaccagctccgacgcttcggatatcaagcgcagcaagcctctcaagtacgcttacgaaaaggagatcgtcctctacgcccaccaccgccagctcgactacttcactactgaatgtatctattcgccggaggcattccgcggcagtgctcgtaccctgatcaaggatcttgagaagattcgtcccagttcgatcctcgatatcgttaagagtggcgaggacatggccgcgcttgtgccggtggaagtccggggtgtgggcaaatccaagcagggtgaggaggaatcagctggtggatgtggtagtcaaaatggccgaaccagcggaggagagatggctgcaatggagaaggagctcgctgagaacgacacagccgagtcgctggagactgaaatcaagattcctaacggttcacgcgtgaaggcgaatcgcgggccgacgggtaaggcggtcaaggtgcagactatcaaacactgtgagcgctgtaactacatttctagtcagcggatttgcaaagcgtgcacgctgctagatggtctcaaccggaatcgacccaagactgcgatcgaagttggtgttggcatggaagacgaagaaagcagttctactttgatgagacaaatggagcgcgcccagctcagcgctacctgaagagtcactcagggaagcatgtttattcaaaccaaccttctgcaccagctttttcggggttctagggcatctccgccatgacccttttgctaggctgtcacctctgcaacacaatcacacccagtgtcaacatcaggtgtccattctcggtgccctaaacactgtgcggcaacccacatggttcgcaatgaacaagttttcaggtcaggaggatcattagataccccaagttacgactgaaacatccaaagtcaatgcataacatagagaaggttttaaaaaacaacaagttctgctacttggcaatgctctctattttattttatacatgaacaatagtatacaaatcccaaaaatcaacaacaacaacgccattccatggacacatacatcccagcgaaatcacactatcttcacaaactttcaaccaagcctagcacaactcgcctcttgcgtagcatcagaatgcagatcatgtccacaatcgacttgtcaccaacagaacaagctaaaccaaggcgaacccaggcaatccctccaaaactcaaccagactcacttctcctcaggaacatgcaagtcaggcaactcaaacccaacccgtctagccgtaagacgaatcttctcctcctcatccatagccgcaccagggttatagcgctcgacgagctcagagtagacgcgctgggcgcgggcatactgagcgagctggtctgcttcttggacgcggatgagccgttcctcgtctgttgttgggattgagaaggtgaggacattggatttcaattctggttggaatgaggataccgatggacttgagcggaagatcgcacgtagttgttggtggagtggggagggggttgagaggctgcggcgtgggagttcgcggaggagggcgcggtaggttgtgcgcattggtgttgtagacattttgagtgaggtttgtggtcggtttagtgggttttattaaagtgtatcaagactctggtgcaccggggtattggaggtgagtttggcttgggtcttgaagatgatcggatggatacataactagagaagacctcgggacaaattaagcattttcccgcctttttctgccgtctgctttaatccacgaacaatagggctttgagccactccctgcgttcttcatcattcctggcttcacggtccaagaacctcttcaccccctcgtctagctctctcctggatttttcataatctacatcgctaaccctaccaccccaatgcttgaaacagccagtgtcgtcaacgaatgcattcatgagttcaacaccttgggcccacagctcgccaccctgctcctgctgctggatttcttcgtccgagaactgtagcgggaatggcgttccaggagatctgccatcccgtccagcgccaataatatgtgcccattccttctcgacatctctcagcaggctgttgaggagcggctggtagtccattaaaactaatcccggaaccacaataacctgatgccggagagtattctggtcttgtatcgcttgaaagaccgtttcgttgagctgaagacaccgaactagacagagattgtgcagtgtctgtgctctatggagtgcttttgccttccgctgttcatctagatccatagagtcaacggtgggaaagcgaccttccccaaatcttcaggaactgggccgttgtaatcgagaaatgctgggcgcccaacctgcgtaaaaagcggacatgcgctaacggactgccagtcgataattcccacgatacggcttgggtctgccgggtcgacaaatatattctgagcatggagatcgccgtgccataaaaccgaggcgtgggtggctttgttttctgggagaacataaggtgccaccttaaggtagttttgcaacgaggggagctttttggagaggctaggctggtattgtccgggtccagagaaaagaccttcgggcattaagggataccgaagacctgcctttgcagttgcaatttccctctgcgcaatagccatcataaatcttatgactgttgaccctaaattttgtgcatggataagcacaagatagtaacatcatacgagtcggagatgaacttacatggaccacgctcaatatccaactcgcctctcccgaagtcaaagaaagaacggtgattagtcggtccaatggtaaacgttttgcttcgcacttcgttcccagttgaatcaaggtataggggcgatgtagaatcggaattgtcaggaaggtcatctttatagtacaacgacccgaacttggagaattttgtagctgccagtcgcctttcaatatcaacaagctggtccagtatttagactttctgcttttctttgacggtgtcccatacatcgttaagtaccacgccggactgcttctccatgatgatgtactctgccccgagagggttctctggtgctcgagaactccatgcgtacactctcggaacaggaaggttcagaaagttcctcagctaaccaagttagtatctaggcgcaaataaaaattgcagtaggaaaaaaagcaagccatacgaaatccatagttgcaacctcactagctgtcgtgaagtgtggtctgcctgcattgggatttggaagtttcgcaataatgtcgcgtctatcgtctatggtaagctgaaacaatttgttatattggccctcggagatctttaacacgtgagtgcatgctttcgatccgaccgcagaggcagctactttcagaagcgttgagtggtcgaatttgacatgacgacaggcaagctgctgtcgctcgttccaaagccaacgacctgaggtaaaccgattgagcgcctcaaggccatgcattgaatctgtgatactctcggtctcattcattttggaattgccagaaaaaaagaagccgccatgagtagtgcatcgtgggggttacagcgggaaagcgtggctgctagagttcttctcaggaaggggcctcggatagccttcatatctagcgttgcataaaggtagagagatctgtcatttcgctgtctataaagaaacagcgtgttgtgaatcccggttgtaggggctggacagaaggcgggtggtgacctgagccgattcgtcttagctgtctctacaatcgccacgacaccagccactaccattcttccacacgtaacctaattcctttctttcgcgttgagctggactagcgtaattgatatggcgccattaatatacacagctgccactgaaagtatcttggttctgttggtcggaacgaaaatgacccgaacatagtttccgaccactttcctcgatggtagtttcgccagtgtgttcttgcgaacataaggggtgctggaaacagacctttttactgcccaaggagtggaagaaaggtataaaaagagaaaagagaatcaagctaagaataactccaaatcgacacgattcgaacgtcattgagatacataaacatgtcaatatataccggggtaggaatatcctatctgcaaaacagtcaatggccatcactacccgcacctcagcatgcatatgtacaaaatgtcgtagcagaacattttttttcgcaagatgtatcaccgttacaagcgtcatatcgacccccgcagggaatcgagttcataacgaaaagcaggtaaaagacaacaacagtatttatcaatcatataggggcatagcgacatgagaaaggaggagtaggagaaggtagggtatggaggatagatagggaggcaggggtgaagatgttggatgagatggttgtgagggattggttgagggagcagcttcaattcgtgttgaggctgacggagacaagtgtggctgaacaagcgactgggttcaagagcgcaaccagccaaacttccttcgtccctcagctcccgtggacggttcgacgtgcaaactacgagcatacaagtcctagacaacgttaatgggaagaaaaaagattcatggtaataaaaatcttacctcctcgtctccggagagcttcgaatccaggatcaatcgctcgatttcgtcggacttctgagcctggggatgaggggtcttctggcttcgttgaattccgagaacaacctcacccatgacctcgaacttcttccagttaatgcgagatttgttctcgccgaagaatgtcttgttgccttcttcagcagaaacaaggtcgcgacggtggaggggtaggaatgggattcgctccgagaacgaattttcccaggctaggcggtaggcaaagtggcttcgttgggtgctcatgaggatgaccagacgcataaactccttctgagctgggatagggatcaggtctcgagtttgcgtgaggcggtggacgggagtgccgttgatggcggcgatgaccgcacccaaggagttgtagttgttttggcggcggagtttctggcaagaagtgttagttgctgctgacctataatagctggattgagaaaacctaccaccgcgatgttcatgaacttctctagcgcctgcgctctatgcttaggcttatcgcgtaagaggatcaggctggctacaaagaaggccagatgattgaattgcttgatcatccgattaacgttcgtcaagctcttgaccttatccttgtctatgcccgaaaggctgacatgacgcacaagatcacgcggccggaatgaattgtacatgatccagtcaacccgcgtcagttctcgtgcgaattcctcttctggggtgtccatgaaaatccgccattggagtttgccaagtgaagtcttatgtgtcagttcaagacgcaaagcctctttttgagctgcctcgaggctcaataatgtgaatgactggctgatggtactgttcgatttgtcggtattcgaggagactgaaagagttcccgagagtcgcgatgtcgagtcatgcggcccactactgagatccagcgcactcatactatatatggggtcttgctcttcttcggtgtcgtaggtgttagtgccagagccagcgctagcgagagccgccgctggagaacttcggccggagttgtcgaagaatgtctcagccagttgggactcatcggaatcactgtcacccccaaatgcccagccaatatcatcatcttctgcattcgagtctaattgcgatccgatctccttggcagcgaacatgtagaaatggctcttttcgagtaaagcgacaaattcaatgatccgtttgtgaagtttgggatgggcgaaatctccaggataatccgaggcccattgagccatgacatcgagtaatcgcagctgatccgccatgcgggccagttgatcttcgttgctcagctcatttcgctcgaatcggctgatcaaggcacttaagagactagcgggagcagcaaactttcggtacagacataggaatgtagaacggaacttctggtcttgtttcgacatcggcaaggaaatcaaacgatcgactagctcatcgaacgatagacccgtctctgcactcgagttgctctcgctgctcggctttggccgcacgactgcgctagggctcgcgggccggctctgtccatcgtctccctcgtcatccatgttcaaaaaactgtcgaaagcgtccgatcctccactgtgtcgccaagcggtatgcaatcgttgctgacggttatcgtggttggtagagtgtagttcttgtaccgacggtctgcgggtatttaaacgcgctccggatggcggagtttgcggtcgcaccggttgcgagttcctgcgggcataacggtgggaattggacgtatgctgcaagtagtttccatcggttgcgagacggttctcaccatccccgtcgacacattgatcagaggctgtttgtgggccgccggcggctgtggacacggctgagagggtttccgagttggcacgagtatgatgccaatcgtgctgggaagagttgatttttgttgaagcaagagaaatattagaattattggagagatctagaagagaagagaggggttagttttttaggggaaaaccgaagacgagtttatggggaatgacaaaagtagcgaacgctcctgccgcgacccaccttggcccgctcccacttgggggggtcaaggcacacctggactcgacaatggttttgggtcggaaagaaagaaatcgaaaaagaaaaggtacaaggggtgggggaagagacgaaaattgcttaccttctcgagtagaaatcactgcccccaaaaccagcgctatgcacatgcgttgagatcgaggcgaggaaaacgacgttcgatagatctcgtaccggtcgtggatcgcatccacttcgatgtcttccaaaggttcggggttgacatcgcatttgcaggccacctgcaggaaaggaagatccgaggcggccaatgagtctaaaatccggggaaaatcagcctccccataccaggtacatccatcgagttcaggtcaaaacctaccaatgagcattgttgttaaagagagtcggtccggcttggtggcatcatggagaaccaaaaccccgtcaatgactggcgcagatgcgtcgcgccctgtacgcggccagatgatattcttgtcctcgtcgaattgaacgtgagtcaagtcgacttccatcagatgcacaatatagacagatccgtttaatgacattttcttcttgttcataggggaggtaggtgggtgcttcatatccagggcacatttgacaaagctggtcttgccggcgttttcttcgccggccactgcaatggtcacttctgggaagccgctcttgggatattcctatagaacagggggaaaggtaaccgtcagcaattgaagcaccgtagccataaacgactcagggtcctgggatcaattcaagacgtacccattcatgctgaccaaatcgtgtgcgcttgattgcgtcgcctgtaattggcgatgcctcctcctcctccagcaatgtgtgttcgaccttcgtccccgtgcccggtttccgcaccacgtcgagtttataaaggccccccggtggggctgaagaagtccggcttcccatgcctggtctttgggaagctgtagcgggcattcctcgagctttatcgctgtaagctctctcccggcgaggttgctgcgagatcatgacggaaacggtcggcaattcttgaggccacggaatggatcggtgtgacagcgctccaattactgtgtaagttcagagaacgagcactgcagcgcatccatcgttaggacagatcaggttcggttgagcagcgaggcagccatccgaggtgtgtgatcaaaattgctcggggagttgacttgaaaactaccctgattagccggagctgcgtcggatatcttggtcttggcagtaacggggaagataaagcaaacagataatatggacagatcacaaagattggggaacatgaaattggtttgaggtgcttttttcatgaaatggggttctgtcgtttcactggacgcccgagagatcttcgtgttcttgaaagcggctcagctaggtctcaaaatgggtggccacgagaaccgaggctgggtctaggacgatctcgcttagacaggtctacagagcgttgcgttatttctagacaaattggtattgattgactagggctgcagtagctgcagtagctgcattgactgccgtgtcatcccctgcccccggaaacaaaaggatttttgtctttgcagtcctacaagtaggtcatctacaaagtacagcttatacacctcatctgcccttgtcttgagattctccatgtgactagtcagaaacatgcagattcaagttttcgtactccgtacaatagtactttttccaccgaaatctcggtctttgaagttctaggccgtttgtgatatgctccgctttattgggcgctaaaagcgccgctaatcttacattatgtaggacttcggcttttagtcttggctcgcatggtagcgttgtatgtggtgtgatattgcactttaaaattatgagcgccataagctcggtgctcggtgctttcacccgtgcactggcaaagatgcttgctagcactaggagggagtagtatgcaatagagaaccatgtaaaaacccaagaaggccgaatattcataacttgcatgaggctgaatatggctgtagctgtcaaatctgacagctactctattggaaccgtgaaggtagataaaaagtcccaccatctcgtaaattcaatctgcatgtctcacttacgtgccgaccattcaactcgtaggcaatttttcccagaagaagatgtagatgactcaggctgattccttgcccttcttgacaagtgccataaactgcatgaaagcttcggcggtctggccagtctcagtcccttcctcgcaatcctgcctcagcttgcgaactctgcccaggccgcggttgaaccctttctcggacgtccatgggccacgactacgaggagctaacggcccacgacctcgcccgcggccacgcccacgtcctcgcgcgggagctgtgtaggattccacccattcttcctccaacgttgactggaacatatcttgtagctggctgcggagttcggggtgccgactgagaagctctttcatctctgacgatgcccccactgctgcgggggtcataacggcagcattggtgccagttggctctgtaggttcagggccgttggtatcgttctcgggtgtgggattgacatcgggcgctggggtgtcactcggttcctcgttcgatggtactttcggagcacagtatatcttatgtgactgggtgcatgcaagcgagcaactaaatcaatacctcttagcaactggtccacttatggataggatagaatcataatcgagtccgtacctcatcagtgcgcatgtgggacagcgatattttgagggctctaaagagcaaacttcacaggaaccaggcattgtgtcgatttcccaatggatccatcagctgcacagcgatcaaaattgctccctcatttttgtctgttccacgtcctgctttagaatgatgcaggataacaccaaagttgggcgaccgaatgatttgcacaaaactaagaaacgcgggtcatctgcttctgcctcaggcactcaatatttgtgagcacgcgtgacaagaactacataaatacgtgacgtgctatatatttagatcgaaaggctgcacaatatatggcaaattcggaaaggggatgccaaaactttcctcggggacctggttggggtctgatcgtcacgtccagaatctacccctatggtgtgacggaacaaagccacaatgcatgcgatacatcaagagccacgttcacccgggatacccaagggatcctatctttatccaccactcggggagctaaagcatgacattcgtaccgtggccatgacaatcacttgcggggatatcaaccggccatattaggtgcatccggtatcaaccccggcgcgagtgcagtttgttgccacctgcgagttgcctttcagcttatgtttccatgggttgattcatgacatgtcaagatcatgttgtcttccatcaagaaacgacacctttttcttgttccgaggagatctaactcgccacatggatatgcaatgcgtgattggtacactgtgttgcttcttcatttcgtagggcagggaatttgaccagttacgtttctttcggtgccctcttcgagtcatcacagccttagactcaacccatcagtgaagcgttgacggctccactattctttccgtttgctattccgcctgcgagtattatgcaggtagcactgaaacttgtactagacaagcggctatttgtctctgatcgccatttctcggaatcgggattttctaacaaatgagatgatgaactcggtggctactgctgctatccattctggactcatcatctgctctatcagccgtgtgacgcggttgaaacggaactatacatacaagtttatacatcaactatgggagagaactcggtggcaagagcacctcaacgtgttacattgttagctatcctgaaggatagactcatccttccgtttgtgaaatgctaaagaagcttgatacagcgtggccttgtcatcatagccagttcctctttgggattgagctcaatcattgtatatatcaagccttcggatgttcaatattttttttcggatctaccgagtttccttgttgagactaagctgaatcacatggtctaccgaacgactttcattctgggtagccaagcttctcaaaagtatagctggtgtgaggcgaagttcatacttcatgttctcccatcataaggcttcggaatttccacgttttcaaaagatagcctttgctacgaggctgacacagggaagaaatttaggtatcttccgagagtctgcgagtaagcttgcaattgatctaagtgtagaatgcgttacaaaaattacgttttgatatatgatttaggatgacaattgaccgtgacctactggtttgtcaagcttggaacctccgacagtcggcacatccattagttgtaattgtgcaaaacatctcttctcattggccagaaaaccctcctcatttgtcatccggctatgacctcaggtcacgtgtaatttaattgcgtcagagcggcagccgaggagaccctcgagtgtttttttttctattcacctgttgtcaactatctctgcccagtacattctataacataatgtctttaagcactccatctacaacaatgttccgccgcgctctgctaagcagccgtctggccactcccgtcgagtgctccgcccgaacaatcagaccggcattcgcacgctacagatatgtgtccagcgcagcccgactcccgaccatcacagcatcagagacccgtcgccgaccgacagtgcgaccgcaccagcagcctgcctcgcagggtggagtgaacggcctctcgccaaccagcaagcgcaccatcttcatccaaaccgaaaacacccccaaccccgacgtaagctcccaaagctcaattatctcatcttaacgaaagaaaccgaactaacctttcatctccgatattccaggccttgaagttcattcctaaccaccgcgtcctcccggaggacttccccagcacattcctcgagtatatgacaccacgatcaacccttgcaccaccacacccatccccgctcgccgcgaaactgctcgatgtcgacggcgtcacatccgtcttttatggcacggactttatcacagtgacgaaaggcagcgacgcgaattgggcgcatattaagcccgaagtcttcagcatcatcacgcaagctgtgacatctggcgagacgatcgtgacgacgatcgagggtgccatcggtaccgagcaagagagtggcgaggactcgctcgcctttaacgaggatgatgacgaggttctcagcatgatcaaggaattgctcgagactcggatccgccccgctatccaagaagacggtggcgatatcgaattgagagggtttgagggtggtattgtaatgctgaagctgcgtggtgcttgtcgaacctgcgattccagcacggttacgctcaagaatggtattgagtctatgcttatgcactatgtatgtccatcgacgccttcccgttcattttgttttgacataaaggctgtttgctaactttgctcttagattgaggaggtcaagggtgttgagcaggttatggatgaagaggagattatttccatgcatgagttctcgaagtttgaggagaagctgcgccagcagaagggtgctgctgctacggcttctgcgcctttggacagcgcgccgtaaaatacgatatctgggagtttataccttgtacattagttttgatatgaattttgcgtaattagattatttacccttctatggaactgcaaactatggcctctatccatattcattcacataaaatccctctgctcatgtagaagtactccagctctgttccaacggtggttgaccccagtctttcatccattctgagtgcaatctgttgagctgttgctctttcgtttggccgatagatcagcatcgaccgaatcattgccttaaacgccctcttttctttttccgtcatagtctccaagcccgcctcaacccgtgccttttgtatagagtattcaaacctctgacctaagtccctccgcgcagacatccctgactttgaattcaattcgccctcttcgttgaatcaatccagttttgcactccacttttcccaccactccgggggtaaaacgccaagtgcctcgacttgctctgcgttcacgcggtcggcagctgggaagaatgcatcaaacaacgggcgctgggcagcaacctcccagattatacaggcaagtgtctagatgtccgacgcaaaggagagcggctcatccgagaatctggcttcaggtggctggaggagagaaagggtcttcgagtagaatttgggtgatatatttgggttgaaagattcaccgaaatcgttcaggaagatcctctcatcgctaatatcaatatccccgcagcggatgccaaaccaaccgggaacaaacacttgggctggtataccattcgttaatggctttccatcgagacgaataatagcctctgtggaggaatgcgactccatgaataagctgggcgataatcgaccgcgcgaccttaggtcggaaaagcgccaattttgaagactctttagtatcaaacaggctcatctgtgcaggcggagtgacgatacacttatgcctgccattaggaccggcaacccaaaattcgtcgagaaggggcggtataactcctcttccaggtctagacggcgcgttcccaagagaagatataagtctagcctcctgcgtgtagccactagcatcagcggtgatcactttcactgccacatatcgagcttttcgcaggtcttgggctagccatatggtcgagtatcctccatacccaagcttgtctatcactcgatagcgggcattgtctaacgcatccccgacttgtagaggatgatatcctccggggtggtatctgtctaggtcttcgacgtcttcaatcagcctatactgggacataccaggtcttctatctgtagaagattcgttagacccagctgtattccgactggtgagtgtggacatcgacattgacttttggatatggaactgattcgatagaaaactgcatgcttgtctagagaaccgcgacggggctacgcgagggtgtgtaaacatctgcagaggcagcatctagcataaggtcaaccgtcacgcttagatagttggcctgacggatgaggtttaggttgggagctgtggttcgtcgtacactggccccccttgcctgtgactgcaaccaattagcgagtcctcatttcaagctcctctccccactgagtaggccacatccaccttgaccactcctccactttgctctgcatgttacggattactagtgtaaatgattggtctttcacaatatttatttgggtgtgaccacgtcctacatatgcacaattatccgtattgcatagtacaatgagacatacacagtacctacgtactgtatcaattgaccagagtccgtgtagtactatcctagcttggcatgtcttggctctagggggtgagaagcaatcaaggaatgtatgtagatcgaagtgtcataaccatggaaacattgccttgctcctagccaactcggggtcctatattactccaagagaaaaaaggaaaaaggataggaaagaaaagaaaagaagaaaacaggacacatgacccggttttcaaatgcaccttacagcgcctacattagcaaacaattaaaatggaccatagccaacggctggatgctgcaacatcttgtgccagggattaaacccggtcggaaggcccggagcagaagatgattcgctctaaataatttacagagtggacattgatccttgagtccccatagacagtattgatagattttctttccctatattgcacaaggggtggaatcatccattgaggggttgaggggtacaggagtcacgttggcaatgtcattattgtaccacacgacggtgtggcacaaagctgttcaacggtccaggtgcatttcctgatatttagagagagagatttatagatagcttccgggagagaagtcaaggtgccaaaaggaggatgttcgaggtgagaagaagctcatttgatattggaggggctggtatgaagtgtcagaaaatgcacgtcaatccggggtaaagtggaagaacctgccccgcaagcgtgtgacccgagggccgtgcgagggctttctttcttttggacgtgaggtagagagccctggcgatactagatactgggctattggtactccgtagagatgtatatactgtgttcgatgtgtatacgtacttctgactgagtgccacaaccccagatgatcggcttatttctccaagggacccgcctgttctgggggggtctacgccacttagccaaagcctatggagagctccgtcttcccaacgatcttccaattctttattattccatatatcgctggaagtgtaggatggtcctaataagttctgctttatgatttccacgtctcatctgacaaaaaagtcgacctaaacatctctaaaagggaagctcccaaagaaactgaaaattctaaaaccaaagatcaaaccatagtggcccgtgtcctccggggcaacgttgccagatccgtaagagaagttaccccaggctctttgcgttcccctcatcttttatttccccctctcttctctctcccactttcatcatctacacaacacccttcttcgatcgcaagatgcgccatccttaaggggatccagcctaattccgccctcccccacgtcatctgcggtcacagcttcgatcgtgcaaacccagcgcattctatttccaatagaccggtcatcgaatatccggattcagcatcttcgttgacacgcgcctcatcccatccccgcaaaaagcactcctactgctcgccagacctgtccgacctcttccatcgccctcgttcctccgttcacgaaatcaacctgtgcaactcggacacagcactcccccaacattcttgacgagacccacaataaccgtgcgcaccttgcaaatagagatttcgagagaaacgatcagagtggtgagtcgcgcaacatttctgccgagccttgtcctgaacgcgactgggctgatacatgggtgattctccagacacaattgcgatcacgcgactgctgttcactttcgactctcgtttccaagtggatactattttgcttgagagctgtatggtgatctacacgcgccagctaaaccagctaaagattctctcgagtatttgacaccaacttgaggtacgtgcgattctgattctcggtcgctttgctttgctataccttatgcggtgtgcgcctctccgtggcgctatctgcttctcttcctttcgcactcttcctttactccccttgcaatggtacttccttcacatccatgtcctttcgtttcagttgcgcatagctgtctcttgatcgaggtttttttttactatccccacttccggaccctctcgcaagaggggccgaggatatgcatatatgcacaatctccgcttttaatattgcgtctctcagtcatgccatacctacatatgcttatattacccttcgtttatccttttctttccattttactatctatttcaatatgggaataatcactgactttaatttagccggagttgaacatagcgcatcgaccagtcatccatcgttcgcttaaagagcaggaatcgacctttactccaatctcatcgagcgcgtggaccaagacgggtgctttctcgcatgtgttcattttaccacgagacatctatacagtacagctttgctattaacaaagatcgtacaggtcagtgaactacctctcattcctccatggcctcgaattattccttgatcagacagccgttgtgttgcttcactaggtttcaagtggcgctcatggtgatacggtctgcaaggaataatcgcatgtgtcacacatattatactgggaatcatatactaacaatgcaacagtgttcctctaaccgtaatggcatcgccatctaacaaatcgaccccgatggctcaatcgtccccacccgctacggcaacagcgtctgccatccttgaaaagactcacccaggcgtgcgccgttccaccccagactcggacgccttggcttcctctgacgatgatggagaccatggagcgcaagctcagaactttatcccccctaccaccagaccaccagtccgtcgcacctcttggttgaatgaagtgcctctttccgctcagcgtaaacattcgctgcctggaagccacctttcttccgccccatctaaccctacaagccctgctactgatcaggcatcatgggcgacagctacgagcccaaatcttgccggatctttcaattggaaccaacccggaggaagtacgcttccctggggcacaagcacaggaatctggaacacagaatcacgcagggaaccgccttctcgcttggcagaaatgataccctctccgaccatgaccaacccacctccttcgggcggcaccataccagacgaaatgttgagccctatcacccgtactatctctggcgattctgccattccattctccatcccgttacaaccaactctcaaaacctatcgctctcagtcatactctgttggtcagatggatccagagttcctcagcctggctgctggcaaggccggtgcaggtgcacaatacccaggaagtcgctcccgtgctcctggccaaatgtctgctgttcagcctcgagcatcacggcctagtatgctcggtgaattaggacatgatactgcaatgcttggtcgagtccgcgaggatgatgatgatgacggtgacgagagtttcaacggctcggaaagtgaaatgagctactcagcgagtcaggctcggcaaatcgagcagctggcccgcgagaacgcactcttacggcaagcagccgcggcaggtcaaatggataacagataccgtgaacgagctggatcggttgcatcaagcagtggagggggtcatccactacatcgcatccgaggcggcgttccagagggagatttggctgcagaggacctaggtgaattgcgtgatattaccggatacaacatgcgtggtaatgctcgtcgccgcttctctgagcatttggcgcccccggaagcgcaattctcgtccttcacctctccgctggagaatcgtgctctagataatgtccgcaaggctcattggcaaacgtctctaggcttcggtggcatgtctgacatgccacaaagtcgccgacattctttcgccgagattccgatgcgtcatggctcagtcggctctgtggactcgcattcgactgctactcctcgcgcaactataggagaccgtgatgacggctatagtaaccttggtgactatcccaaccgtaagtctatatacttctacacccttttgcttttgctgtcattcaatgctaatatcttctgcagaaccatactactcccgtgaacagaccttgcgtggagatggctcctcgggtatcccgtcatctctcaaccaatatgcgatgtcgaatgcatatgggcgtcagtcatccgcgttgtcacatgctcatcaaaatcagcttttgtacattgtcgccttcaaatgcagccgtgcagatgttttttacatccaagaagataccggtcttcaggtgaaaaccggtgatctagtcattgtggaagcggaccgaggaacagatctaggcaccgtcattcatgcaaacatatcactccaacaggcacgggagttgaagcaacattacgcagaagagcattacaagaccctcatgattttctctagacacggccagcctgaggggtccaccctcgccaaccccaacacgggcttgaacactcgaagtgccacaggtggcatgggtccccatggtcctcacagtgtgcaggaacccgcgacagacatcaaaccaaagcttatcaagcggttggcacagcaacatgaggttcttaccttgcacgataaggaaggaaatgaagctaaagccaagcgggtctgccagcaaaaagtggttgagcaccggcttaatatggagatcctcgatgccgagttccaaatgtaagtctacaccattccgattgccatccgtgatggttgaactaattgttacgcagggattggaaaaaacttacgttctactactttgctgattcgtacatcaacttcaactcactggtgactgatctgttcaaaatctacaagacccgcatctggatgtcagctatcaacccggcctcctttgtcacaccccctacgtctggcctgtcaggtcctggcaccattcccaatcctctctatgcccaggaagcagaccgtcgccaccaacttgacagtaggtcctatggcggagcgcgagattctgtcgacacaggtcgagatatgccgaaccctgtgggcatgcttcgcacatcctacggagagtcctaccagcctttttctcagccatcccgccactcagaagggcttaattcggatgcctttgccccacatgtgccatcgagctttggtcccgcagattcattcgaatatcccggcaacatcggtagctccaatggttcttcccgtgtgcacccagcgcagggcgaatggatcaaccggttccagggcctgtcgctcaactcctaaatcccttttcctgcctttccttctcttgaatctccgctcctcctcgcctatctctgtacaatcgtctgaccctgccctcccactacccacctgcgtcctgtcccatattatggggcttgttctcgcggtgaaaagagactccttatgaacctagatctgatcagctttgctattttctctttttcaacgcagatatcgccacctcgtttatctcgtctttttatcttttctccccttcctcaaagaatgctttccgctgaaatctggacgcgcttgccgttcgtttcctgtgttatgttcactgtgagctggtctatcatacttcttctgtgccccccgtaccctcgtttttatcgaggttttgaggtcttgttctgtactactgttgttagaattcatacccaaggcttgctgctctgccggacacattcccccattctgtcattaccgtccgccctttcttctcgccatagatctgttttttccgtgacgaatcatgtcttccataatcagaactatctctatctacaaatggatgtgtgtgttgtttgtgttaattgaagttaagttgaatccttgatttgagatactctcgtgtttgcttttggtatcccgttgataatttcttaacatacaagttgtccacagatcggaaaagtttgaaacttgcgattaccagagagaatagaatataaaatgggttcatacaaccctagaagagagatttgtgtcattattatggctttcctcgatgtacttccaaaatagatgcgtcgttctgttgatagagaaatgaaccaccatctaggtggccctcgaaggcttgcagagtgccatgcaccgcctccatgattcccttaccgggtctgcctgaatcgatcatcaagcccagccaatatgttggggtttctctcagtctgatctgagctcgcgtgacgcatttctattgtcttggctgtcagtgacctagatgtcgacaggccagaccgacaataggcgagagagaacattaaagccccggcatcaaggacccaagcccggagctagcacaactcgaagatatatcgtggcgaacagaaccaagtcagccttgtttcaggacagaaacactactaccatcccatcagcaccaactctcccaaaccaggaaaaaaaaaaaaaagaaaaactcacctgaagacctcaagcccacttatcatgtttcccactaaccttaacatccagcagaatctcatgaaaattcccgtccctcctccctttcctcaacctcctaacctcctcatcatccaacaccctcccaacaatcccctcaagctccttcttgctaatcttctcgtacgctttactctccttggacgcgcgcaacttcggcttaaatctcgcctgcatgcgcacgcgcaccgtcgtctcaaacgaaatcgtattcgcgtcgccgcggatctccacgccagaagcagctttcgcgttctcttttatcgagaggaaagactcgccgtcgccgccgtgcgtttgtagtgagaatgtccccgagacttcgggtgaggggattactaggaaggattcgtagtggctgactgccgaggcggttgcgctgaagaggccgtgtgtgtctgaggagaggtatctgtagttagggaggttgttagttttgcattgcattggaaaaataaaaggaagacagaattgaaatagaaattgggataatatggctatagtatgcgcatgcacatattgcgataaaaggcagtagtatcgattcacttacttcccatggtgtcccttgaaactgaacgactccgtccccgccacccgcgacgcaacccagacctgtcgcacatcgtgtggttctgccgtgctcgggtctctctcgatgaggttctcgagcttgctggcaaaaacttgcccgttggcgtcgcttgcgacgcaggttgggtcgtctgagggcaggactaggaccactgggccggcgatgtcgcttggagagtcggcggagacccagctttggtcttctgggttgtcgtctggttcgggttcggttttgcgcgatttaggggttggggcttcggtgtctgcggtgcgtgtcttgcgcttctttggcttgtcgcctttgaatgttaggggtttgaccattgtgattaaatgggtgatggttgttggagcttggagcttggagtttgagcttggagagtttgcggagggcggggacgaggccgggcttggctggggtgacggagcacatggttgactttcatttctatgtggatttggatgtggttttgtatatatagtcttctttttgctaatataaattccctctcggcgtaatatcgcaggtgaatgcttttggcccccattcgctacatgagtcctgactactcaatataggctagtgctgaactagtacggattgatactaaagcagcgactataacattcgactcttcatcatcaacttcttttttctcaaatttcattcctatctacgaaactctcgaccatctccttcatagaaccatctcacgtacataactatgtgccccaaacctggccgccttgcttccattctccgtccatggggcctgatctggttctcgatttgccgcaagtctttggtcaccgaatttccacgatgatactaatcatccattatagtgcattgggaagctttgacacaagcggttcgtcgagacggtctcgcagcacttggccgcccacaacaaattcgagatgccgcttcagcgaagttgttcagtataacctgtaaccaaaccatgtcttctctcaactcgtgcacagagtgaattgaccaccatatgcagctggaaatttcatcgcctatgaagacacaaccgttgttccctcgctcgtacaagctgctagtggcgttattctcgaactgggccctggcccaggcaatcagattcatcgttatgacaccgctcttgtcaagcatatctatggcattgaacctaatccgcacttcaaagacgccatagatgccaaattggacaagtataatctgcgggataggtataaggttatagtttgcggcattgaagacagcgatgttctgagggaagagggaatcaccgaggggagtttggatgccgtgctatgcatccaggttctgtgtgcagtaaaggatccaaagaatgtgatgaaggaggtgtggaagctgctcaaacctggaggcaagtttatattctgggaacacggatggagtagaaaccgcttgacgactgtagcgcaaggtgtgtatctgcctttcttcttttctagactctataggtgcttggctctggaatgacgcagaccggctaacatgaagaaaccttagcttgctggaatcctgcttggggcacatttgtcggatgtgatttgacgcggaatgtgctggcagacattctcaacagtggagagtgggaaaatccacgcgaggtccaagaacctgaagaaccgtttagtctgttgcctaggattcagggtgtgcttgtcaagaaggcttaatgcctacatcgccaatatgtaagaagacaaagtagagctcctgcaatagcagcagtctagacagtctaaaagacaacatttccttttcaattcactgcataaacctgtcaataatattgccgatccgatttgacagattattaatctcaaaagtgctttggtctatcaaggtcctcaatttcaagtacacacaacgtcaagatgtcccatatttcaggaagagatcaattctattaaccatctctaggaaaacgtactttgtatgatgacatccacgtctaatcatctaattgaaggtgatggcagccttgatagcagtcttgttgcgcgtcgcctaaaggcactcctcctcctattatacaccttgctcacaatgccatccagttttacctggccagagtcaagattgtcaacagcagcagggaacttgtaggtctcagaataactgctgaggatcgtgattttatcgccgactggaagggaatcagcaaagcactcaagagaagcgacagcaaaacttacagatcttggctggcggccacgagacccgaacctcatccgggtacacgcggtacatcaccaacttaccaccacgacgaacatagttaatcgagtcgtcgagaatcttcaggctaccagtagcctaaacaacaatgtcgaatccatacggcttctcagccttgagagcatcaaattgagactggggactcgcgcgacagctcaatgtacttgtcagcaccaagcttctgagccaaatccatcttcagacccccaacagaaacaacaacgacattgcaaccaccattctggcgcagcatcttagctaacaccagaccagtaataccatcaccaaagatcagcacggaagagcccatcttcggagtgatcttgtccaaaccgtgggcggcagaggaggtaggctcgatgagagtcgtgtcgatataggaaaagttcttgatcttatagactcttccagctgaaagaatatccaaaatcagccttgggaggccggtatgctgttgagatattctacttacccgggtaggcgcagtcgttcaccgtcacaccgtgagcctcgaagtgctcacagaacagctcatcgccacagcgacagtagaagcatatgccgcatggctcggaaattatcagcgaccacttgctcgccgatctcaggcacagggacatcaatcttgggctctgattgctgcagggcacgcatggtcttgggtacggaggtggccatgattgaatgtaggatgtgttatgtggagggaagagagaggaaaagttgagaagaggtggtttgacgaattgtaggggacatcctcaacggatcgttagacttcgctgttggctggggtgtcttggctgtcttgtttgctctttgcgctttgtgaaattgactgacttgaaacaagctgcggcaaggacccttgacagtggatgctactccgatccgtggccgtgtacatgtattcctagcctgagactaccaccaaccatcatacatgtgttgaccacgcacctaacactgccctagagacaaaatgatatgtttttctatatatacctaagacactctagtgtggaagtaaagaaaacaacttaggaaatgagagaaaaggaagagcaagctgatactatggacttgacagcaggtggcctagtggtaacattcatgcatgtgtactactagggaagtgccgaagatcttccaccacctggaatgttccggatcgatttaggttgctctcgcgttcgactcttttttattctcttgtcagatggaatatcttctcgcagtccgatggttttcgggggcctgtggtgtctaggtaaacacattgattgagatatttgaaaggatatctacatgcattatgttgtttgtcttccacatggaatatgcatctgtccagtgtataaatcgctttctaccgcttggtgctggtgctattcttgagcatctcttccaaatgctgcaaggcaagttagttatagggtctctgatagacatgtggacaagtcaaatgcttacctgcttctgctcaactgctaatttgccttgggtatcctatttccgattagcggacgttgcccaaacatagggctagcaacatacgctaatgatggttaaaatcaatgaataattgttgaagaggaaccgctctcttcgcttggcgtctgtaccattacgactcaatttggccaaaagagaatcgaattcagcagtcaaccgggccaggctgttagataccggctcatcatcaccagcatcgctgctgagcacaaggattccatgtagaagctgtccgaatcgttgagtcaagaagtggggcgccgaagactgcttcaagtcatctccgcctgcaatcgaaagggccgagacagcactgcgactagtgttggacccaactcgtttgagtgagtcgccatgctgatccataatcacttggaagcgtggccagagctgcatattggttccattaacatacgagtcggcgacgggcacctttcggcgctgaagctcaaacgcggaatgttggttgaggcgaacacacatgaggacacccagagaatccgtggtgtgctcgattaacttcttggtctggttctggccaagggtaaagaccggttggaatatttccacggcattgcgagagatttgatggaaggtctttggggagaaaaactcggtcaggaaagaatactcggcgcacacattgtccaccaatgcgaggttaaagtttcgaaacggcacttcgattccatggtaggtattatcctcttcggccagatatgaggataaagcctggagattgccagttcggaggacatcaatacgtctacccaaggagaaaggatcgtgtacggcagagccagctcggccgccaggcatcatgttccctgagataatcagtatatttgggagcatgagagcagtatatttcttacctgagcgatgtgtggatgggtcgcctccaagaacctcgtttcggtcaggaggataaaccttgaccttatcgagggcttgcaggtaacgtgtgaaatgagatgtgtaataccaacgcattgtgttgatgtacgcctgtgatatctctcctgccagctttgggtggacctttgagagataactgtatagatctttaaacttcaccagtcgctgttgttggataatctgagagttgatgtttggcgatcgcatagcacgaatttgtgacacaagataatctctgatcctttgaactgcctacatagatgtcaatgcaggtctacataatctgagggcagcatactcactttggtcttcacatcggctaaaaggggtcttacatcctcgacggctttgtagccgttggaggaagcagcggccttggcttcgatatttgttgttcgagaatcgatctcgttcagtgcacgcacccaattctcatcaattgggccttcgacaattgtccgcaccgccttgggggaaatgctgatctcctccacggcgggtcccagcagccgttccacgttgcgcctattctctagcatcgcgttcaattgtgttgagcgagattgcaaagtttcaatctctgcggatacggcacccagttcattctggaagtcattcaagtacagctcaactgacttggacacctcatcacatccagtaatagatgtatgtaactcttcaaacttatctcgctcttgctcaaattgctggacagtttgcgcgtttacatcactctcgcgcgttctttttattggtgttggatcctcctttttcagaaagtcttcgagacttagcccgtcaaaacggatagcttccaccaattgccctggtcgttccggcaccgacgatagcggcggcacatgcttatctgtctggtttttttcctttccaatgatttcattcaagacttccagcggatcgggaacattggccggtcgaggtcgttgaatactcgtctgctttaaaggagaaccattggtcgcccgtgcagttcctggaagagaggttgtagagtcgtttggggtcaggagaagagatgttgacgagcttctagatgttacaccagggcgactattgtagggacttggagatagctgggatgatgagcgtcgcggtaaaggagaaaggttgcggctattggctccggaggaagttgactgggctgaaatgcggtcgcgccacattgtgtaaagggatgaacggcatggaaatgcagaacaaaagcaagaattcaagtgtatactcggggaaatcaaccaagtaacctcaacaagaaggtcgaacgttgtagttgttaggttgtttcaggacactcggacgctccgcctatatacactaaacccaacaaggtggacaaccctcctcgaccaatcaccggccagtaagcgaccccgccacagcgcccacgatagattttagtcgtttgaatttctctctccccttctcttcatttttcccctccccaaattttacgaaaaacccccctctttcaacccctctacatctattcaccatgtctgccgaggaggtatgtactttcttttacaaattcgagatcccccaatggctgtctcgaggatttctgtccctgccccgcatgcggctccccttctattctcttctcgagggcacgaggctatattggactctcaaccccgccctattgtctcatttgaagcgcttgctaacataattcaatatagcacgatgtcactttcgattcggctgatgccggagcctcgctcacctaccccatgcagtgttctgctctgcgcaagggtggccacgttgttatcaagaaccgcccctgcaagatcattgacatgtctacctccaagactggcaagcacggtcacgccaaggttcacttgatcgccaccgatatcttcactgccaagaagcttgaggatctctccccctccacccacaacatggacgttccccacgttattcgcaaggagtaccagctcgtgagttcccctgatgacttgacggttgaattgttgggttgacgaatattagctcgatatcaccgaggacggcttcatgtcccttatgaccgacagcggtgacaccaaggatgatgtcaaggtccccgacaacgaggttggtgagaagatcaaccagatgttccttaccgaggagaaggagtgcagtaagttccaaacatatccaaacttcctcgggacttatcactgatatgtgccatcagacgtcgtcgtcctgactgccatgggcgaggaggccgctatggagtgcaaggaggctcccaagtctggttaaatttaatacatggatttattacctgttatgccagcctttatgttccacgagggctcaaagcccgccaaaaattttatctttcacggttcaaaggaggatacgattctttgaatgattatgcccattgcttcaagatctgtccccacataaccttggatgtgggctggaccgagaattgctttggttggcataatatgtgttgtccgaacagttctgagtctcagcatctcatgatagtgtgatgaataaatactcaatcttgcttgactgcgcgagggttctagtagactatgaagtagatgaatgaatttagagctcaattacactcaaccaaaatatacacaagtgtaaccccacaaataatgaaaaaaaagtacctacctagggactagaagcttgcaattcaatcgtctggtatagtccacggatcaatcacagcgcgcgcattgcgggacatgtggagcgacaaaaatcggcggtcactaggaggcagaaaaaaaagtcccgccatctggatataccaacccttctttgtcaaacaagcatgaacaaatcccttggggatggactacgttacccgaggggtctgcggtcaagaaggttgtcgtgagacccgatactatctagacaatggactttggtattgtcggcgcggtcatttgcaggaggtatgacgtccatcggcttttttttttatcctatcactgcatccaatgtcaggaagtacacagctaatggctatgcgacatgtgtagggtgttcaagtcgcagaagatgccgccgattttggaaacctaggcaaaacacatcgcgtgaagagagaaaccagggagaaggtcagcaagagtatgtaattagcagcttcagcctcgttctctctgctgactttactaacagcactccgtggccgtccggcatacacgcttttcttgcagacctaccagcttatcctttggaaacaatgtcatgccttggttcatgaacacgggttcccagaggaacttgaggtatgtgcatatgttgcttcttgtgttcaaggataacagctcattatttattagcttgttgtccgagatctctgggctcttcgtctgcaagatttcgaagcaagaatcactgattctactgatggcgacgacaatgatactgaatctgaggtattcagctcgcaagccgcaaaagatgaacctcgtgatatgggatttaaaccaaactcgagatatctcgaatggcctcgtctgatcgattctgttgcactgtgttatctcgcagcgttcttgatgcggcttcctgtctgtgtcagtgatttccacgggtatgtatattctttcctccatgcaagtttgcttctagaatgcgcgcaatactcacattctacagcatgataatgcggcaagagatcccctacgtccgagtcctggcaactgtcccccgagaaatgagggataggcttccgccagaactgactgcgatccttgaggttaatgtgagtgtagtctgactctgggatattttctgggttgattgactgatcttgaaaaagtcaatacctaatgccgagcggttccatcgcggcgtcctggcaatagtgttgttctatcagcgccggtttgaattggaccttcctcccttgaatttacccctggttcttttccggctcatcaagagattagccttaccaagtatgagagacagtccgccaagtggttgccagtttatattagctaacgaattttagttgagatatatgatacaactatgatcttgcaagatctattaggcttcacacttcagtatccgacaacaagttcatccgatggccgaaaaacagcacttcttcttcctgacttgcaattgatggtgctgattatcatttctacgaaactcctgttcccaatcgatgatttgaaaaggtatcccagcacagatcaagagcccgctgtgcaggtcatggactgggccctctgggcacgctcccagaaccacttcgatcgtgatcggggatttgggggaaatattggaaaaaagactgccattcagatcacagaccaagatgtgttgaacatgacgtctgcccaattagacgattacatggactggtaccaaagcagttggctcgatacctctaaggaacccagtcgcattgccacgatgtttcccatcagccgggcagaacgagatacccaaccaacctctagcgctgtcccagaatcatcctctgcttgtaccactgcccctgcctctgtccctgtccctgctactggtgctcctcctgataagactcgagagaagctcgaacttttgctacaaacagtcatgcaagccgttagaaccagaagggtcatccctgacgacaaagaggctgatcacgggcgtcccggcgagtggtatcaccggtatcgatgggaatcacatctcagtggtcccgcacggactttttatgaggtagcagcccagctcgctgcggtccaattgaaaacacttgttcgtgctgtcacatttgttgaattcaagatttcacagcaagatgaagagcgacagaacagagagtacttcgctaatttgggaagacaaggaatgcacaccggggaaagcgatgttggccacacgtatggcatggctgattttgaagaggacatgtacgaggcggggtccgaggatatggatggtgatgaaattttattgtaatcatatacacggcgctgggccttcgggatcatgtatctggcgttcacctttgtgtacaaccttttgtctttacctagttcaattacttgattttctaaggtttctgtgaattattgtctttctcgacgcattaatctttccagctgaggtggtagtcgaaggatttgtttattcgatcaggaaataccattgagaacagaaaacacgcttcatttatggtgatctactatacttgacgtagatgcactaccaagttatcattggctggttggtcgggctgcttacataacgtatgacgaaaatgggcaacaactagggcttagggtaccccgatcggtccacctttgctaagcgagcgaaatcctcaaattgacaatcgacagctccgcctggaacacagcgaccgacagccgacaacaacgagaactcgcaaccagtacgtcccataaacctcgtgaaacagcatccatgcatcgctatggattcagtgagctaacatcgtctttttccgcgccgtttcagtgcagatgtaggtctttctgaacccttaaatgtcatcgcgaaccacaatcccgatcccatcgccaatacgacccaaacccatggaggaaaaatgaatatgggctaatacggtgcgatgtagtttcgtcaagaccctgacgggtaagaccattaccctcgatgtcgagtcgagcgacaccatcgacaacgtcaagaccaagatccaggacaaggagggcattccccctgaccaacagcgtctgatcttcgccggcaagcagctcgaggatggccgcaccctgagcgactacaacatccagaaggtaggaaccggaattcaacttgtgatgtgatttggaccgagagcggggggcattgtggtatctcgggtggatcagatttccaacatgttcttttttcagagataaactctgtccacggatacgcaagaggaggaatcatcgctttgcgttatggtctatggtctgcgaaatggtggaacattcgctaacatgcgatatcaacctgttataggagtccacccttcaccttgtcctgcgtctccgtggtggtatcattgagccttccctcaaggcccttgcctccaagttcaactgcgacaaggccatctgccgcaagtgctacgtacgtttaccccgccttctccgcctgcgccagatgattgtcatgaagaaatcgcctttagtggcaaggccatgaattccatgtactaactcgaacctattacaggctcgtcttcctccccgtgccaccaactgccgcaagaagaagtgcggacacaccaaccagctccgccccaagaagaagctcaagtaaacgactcgccccttggtcttgtgctcggcgtgctgttccagagatggggattggctggactgctacatggagaggattacaaatggcgttagatatgatgataaaatcaatgcagccaccgtcatactttttctagttgactcctctcgacgaccaagttgcactccatgaaatgaaatgtgtaaaattcaaaaagtcgaattgcttcacatctccaaattccgtccgcgataaataaagagtacaatacatgcatgcgttcaataacacgactaggaaaactgctacctgagcaagaattgacggaatggccagtattccagatgaaaagccaatgatccatcctccctcgcttatgcccggaacatcatccctttcgtgtcgtccttgtcatcattggggttcttgtccttgttgttgttcttctttgaaaccgggctcccgtgactagtagatatgttagctcaaggtcaatttgtttgtcagacaaggacactacttacgcaaagaaaagcaccttgatagcaatagccagtgccgcatgtagcacaacaaccaagaccaagaggatcttgctagccttggcatcagtagcattcaagaccggatacaagttccgcagaaggaagaagacactccaagcaaagccaacgccaacaagcgcccagttcagcgcagtcaacggactccagctgaccagtgcaacggcaatccagaccaagttagagtatccatataaagcccagcactcaataaggtcagccgtcgagctgccgaaccaacgcagcgcaccccacagggcaataggcaaaatgccggtgtacccatagaccagaccagccgcgcccgatagcaacgtgaagtcgtactcgaagtgcttgtcatcattgttcgacagccattgcgagatagtgcctgtcaaaaacaggataaccaccaccgtagtcgcgatccagatcggcccgtataggtctgcgttaccctctagcacatcgaggaagttggtgcgcggatacaccgttgccacacagcggcggaagacttcattcgtgtcgacatcgaagaattgctcgtagtaatgcagcgaccaccagctgtatttggccggcgtaccgccaggggaccggtcacggcggcgcgatggcccgccacccaggaacggggcggagtcgccttggactttggcggttctttggtcgttttcaaagtctaagtaggattacttagttagagaatcgggctgggccggttcgcttggtggaactcactggaggggtggaattcgaggtcttcttgcaggtcggtatggccaaggtcgccctgctgatttgttagacggaatggtgtgttgttcatcacagcgctcttacctctgcatccacatctactacgacatcgtagcctcggttcgccattgtggttagttttgaggtaagctgttggaaggggagttgttaagtgtacacatcagcttccgcagataaagccaccgctcaagccacaactgtggataccagatcatacacgagtatgtagctaatatatattatttgctatgaattgactgagttctttcactacatgtaaattatgaagttacgatcctcagatataaggtttttttttggtttctgtcactttttctctttattatacacatgcaatagcaccaagcatccgcgatatctgacacgttggcttgagattaaacccagttccggattgccctttgaattcggccaacataagaccaaatcgaggtgtcgagtccctttttgcggatatagaaagatgcagttccaaccaatatagccagtaacacagaacccacggagcgacggtggctccataagaaatccatagctcgtttcctgcgttcttcggcccgaatctgttgggattgcttttcaaaaaagtacatcgcgtcttctggggtgcacttgcgatgtgggtctcgtgaagtcttgagcacgctacaccagggaatatgtttccaggctccaaacggcaaggatttcggcgggtggtcatcaaagagccgagccgcatgcagaatgtgtccatcaagatcaagtgggcatggcagcttagaaagcgtaaaatgaagcatctcgggttcatacactggtattgccagcaactcttttttcctagacaggatcattgctgcgaagaggtaaattgcaaccacaggttcacgagataaaacaaagtcgaaaactcgtgagatattgctgtactcttgaatatcatgggcgtatagtgtcagtgtagctgcgagagcgaagaatggttcaatattgtcaaggtgtcgtcttagctcagggtccgttgtttcgattattgcaggaatgagatgaagatgtttcacggctggagacagcgatggtagcatgtagtcacgtatgcggaaaagggatatctgtgctactgctggcacggcctgcttctcgcctagtaccaaaagaagaacttggactatgtcatgatatccttggaaataacaaagcatagggtattccctaagcacctgggtgatcagttttgatagctgctctttctttttcaacatctcctcctcgggagctagactctattaatatccaaactcgtcttgtatggagagttttaatagcataccttttgggtaatagacaaatgatcggttgacgtcgagttctacttgttcctcatcggcatgtcgtaaaagttcagtacttggggccgtatcaaactgtcgtatttggtcgtcgcaacgtaacaaaataggccctgttcaccagttagttgagtctatgtgtaattttaccttcttcaaaccggaatatatactcacaggctatctgtctcaagtcatcttcaagtaacccgccttctgaagttgcgtgcacagccaaggcttccacatcgcgcgccgcacatgctttgcggatggcttttgccttttccgctcgagccatctgttttgctgttgtatccaattcgaaattgtttgagggttcttctgatgcagatgtgtcctcagagctgggatgacccggttcttttccggtatcttccattctttattcgctaagacgtccttctcaggagatcaagcagctaatatgcacacacaccagaaaagatgaaagttatcactcggtttgtttttcaatctaaatgaataacattcaagttgtgcgttttgaatttggctcaataacattgagagctcaatcggatatagatcgaccggagccttttcaccggacaacgagacgacgtgtccaaagcaacgactcaatgccaaatatgtgagaatgcgctttacctttaacaattaaggtccctttgaatgtgagctgatgaatgtctaggcacgtatacctagacgtggaaagtctgaagtcaaaggcggcggagtcccgcttagcggccttaggcatccatcggcagccgcgacatgttttccccgataacaacattcgctctgtgttaggcttaggcacaacgctccggtttatgcttttcagcactcatcgcaagatctcggacacatatatttgtgtaccgtgttgtgcgcccttaggagttcacagtttctggggctccgacagctcaccgacgggcggtcattgcataactccgggattggcttgctctgctagtgatagtgttagctctgtggcaagtaaggaattgcttcctggagcttggaaaccaatggagcttgtgtcaggcacgtcttcgagagctgatactactgtacagcgttcgggcaagctgtaagtctcacattgacatttgttcttcatatgtggggtacattggttaataaagatattgcagggcttgtctgggacacccttgactgtggaatcactgtcaactgcctatactctcttcaggctctagttgtgcatcggatatcaattcacagccagtatcgcatttggcagttgatgcataaatcgcatttgagacattccactctttgaagtatgaagacaagtggaccttgcaagcatcgaatttaattaccatatttcttgaatataggaagttacagggcggtgtgcagttcaaacaatattggggcttattgtgcctcagactggctcttgatattgcctattgcctactttccttactcgtttacttacgactccgccttatatcttccatctccatccttcatctctctctttcacaacaatcttcaagcttcttcgtatcacttgaccccgctatacgcctttggcttcagaatcatcttctcatttgctctaatctgttatcggtttcttgtgaaacccactcaattactgcaatgtctggcaaccagcccgtctcgcgtccgacgtgtctgactggactgctcacccagccactgatcccaagtcctgtcatcaactggattcttccagcgcgtcttcgagataaagaccacaacgatgttgttttcattggagagcggcgaattcaaatcaaggaagccctgcccaatggtcaccttcaagatgttgtcgaaaaatcagatctcgaaggctcgctcatcggggcaaaggtcatcaatgtaagcactcagttgccctgggaaactcagcctccatcaagcttgatggctcaccctcacgacaaaaatcaactcccacctcaaattcttttccttgctacggactcaaatgagctccttttcatgtactactcagagattggagatggcccatttgtttcctacagtcgacctttgccccgcgatgtcaacatagccgacaagtatggcaagcatatagctgttgatcccaagtaagtatcgcccattgctaactcagttggatcgacgaaagcttacaccatgatccaggtcgcgcgcggttgcagtcagtgcgtcgcgtaatttcttcgcggtcttgtggttaaaatctcccggcgaactccagatgcagatggcccagggaaagctgaacccaattgaatgcgtatgtcccagccatattttattggtcgtttgcctgataataacaatcaacaggaaagcttcgtacaagtggagggcgatatcctgttcatggaatttctttacccaaaagacatcaatgacaaacggaccattctacttcttctcgtctataaacttggcacaacacggtctatggtgttcgaatgggatgaagccagtatgctcaaccgcatgattcccaaacacacctcaatctttctgcctcaggaagaccagttgcctagcatggtcatccctttggctaaagaatcctcctacctcctgattaccacaaattccatggcaatgtacacacccaattcctcgtctcgtccgatgcgatacccaccaatcattccagatgccgaatcgtccgaagctggactgtggactcgctgggccagaccttcgcggaactggatgtacagtcagaggtacgatggaatattcctttgtcaagaaaaaggctggatctattatctcgagtttggcaacgatggtgagctcgaaacccagacttctctgggtcaactccactgcgatgttgatacggcatttgatattcttgatatgggccatgaaggtggtgacttcattctcgctgctggaagccagggtgatggcggtttgtttgtccaggaggcacgggatcaccccagatgtgttcaacgattcgtcaactgggcaccagttcccgatgcagttgttattccctcaaacacctcaggcatcttcaaagacactccatatgaacacgatcggatatttgtctgctcaacctctgcttcaggcaatggtgctatcaccgaacttcgatacggcattgaggctcagattggagtctcagccgcattgggtggattgtccagcatacgtgatatgtgggctgtgtcactcggtgctaaggattcaatatacctactagcctccgacccgctctcgtcgttgctccttcatacgactcccgacatgagagatggcattactgcccttgaggatgatacaggtttggacatccaacagactttggcaatggactctacaccttccggtgttattgttcgagtcacagaaagagctctgcacttttttgtccctactgatttctctctcagcagctgtgttcaacatgatccccttgtatctgtcacagcagctattgtggacggcccaagttccactattgtcatgactacaagaagtaaaaggggaaattttctccactttcttcggatagtcatgactgaaggacgtgcctccctatctgatcatgaagttccataccaactccaaaaagagcccatctgtatctcccaccagaattggggggaagttggcttcattttcctcggtaccagcgatggtacagtgctatcattcgaggtttataacgagactggtggaatcagacaacatgccgacactcgtatctcagtcggacgcgagactgcaaaagacatgtcagaaacgattgaaagcctcgctattatcaatactatctcaggcggtagaagccacgcgctccttttatgtgggcttcgaagtggcatacttgttccattcaatgtagatacaaacgtcgttgatcatcagggtgaccctgtattcggtttcaaacgtgagtcgtctttcgttcagcagactggtcccttgcatccctttcattaaccaggcactttcccttcaggtttggaacaaagagcgccacaccatcttgggcaaacatcaatcaacctcaaagcccacaataattttgcattgtttacatgcggagatgatttctggcgtgtgtcatgtgccccgaatggcaaggacttggactgtttcttgtctcgcgtttgggttacagatcaaaactgcgtaagttatattacatccttcccttttgagctatggtctaacattcatgccagcccgcatactttcctaccaggttcagcagcttcgaccttgtcgatgtaagagatcaagagtcagggattccaactacatacatgttttgttttgcggatggtcaacttctgatatgctctctggatcaagaagcaaaggtcgttcctcggcgcatcgacattcccgggaatccaagcaagctcacctactccgatcatctccaaagtctcattgtttcatattctgtgacccagaccggaaatcaagaaagtcctctcgatatttcccgcacggcatgtatcgagtttgtggacccagacagacagtcaccagtggtctctaccgataaaaacctggttgcccaaggccatctcccctggagaccacatggagtttctggtgagaaagtcacatgcatttttgactggatgccatacaaggatggcaatgcataccatcttatcgcaattgggacttcgatcagtttgcctcatcgacccaatgaccgacaaggtcgattgatgctcatacaagcgtctcgagatgccaacgatcctgggcagatcacttgcattgacaagcacacacaatggtttaaggacccagtttatgccatgacggcatacgacgatagcttgattgttgccgctgggaacaaattcttcacggtcacctcacgaaattctatgacgaaatgggttcgaaatatcacagctactcttccatccccagctgttgagatgacaatgcacggaggcatgatctatgtcaccacctcgagacactctctgctggtctacaagatctcaaacggggatatcttaatgcacggtttcgacccaatggcacgcgatggtttgtcgcacagtttattggccgggcatggatgtcaatcggatctccttcttgtgagcacccgaggtggagctactagggcattcacagacctcgatcaaccaggtgaccttgtgcctcgtccaacggccaatctccccgtctcattgatcaagctcactcgaggctacaggtctccagctgtgctgacgaccactaagaccttctatggttttggtatcaatggatcagtctacaggctcttgtgccttggtgcgaaggagtggcaccttcttcgacttctgctcaacatatgccttagggatgaggtcatctgtccctccctgtcccgcaggcaccgctaccttgatgcaatctcccaggtcgagaacagtatgcatatcgacggcaatatcctcgctcgccttgtcagtcgcggcttgaagcacctggatgaggttctcctggcgtgcaacgagagtcagttcaaggacctgactcctgaaacagtgcacatgttctttgaggcagttcgggacgtgcttggggttaatgaacaccatacccaggcggtttttagctggcttcgtcatattctacacgttgagatctaagatatgaagagtatttggccaaggtgaagaagtgtggagaaccaagcttggaggacatagccctggaggtttgagtcaagttgtgagagtgtatctatgccctagttagataaaatgttagtattaatgttcgaagttcgattcctggtagcttagcacatatgcgatatcagagatcctagggaaaaaaagcccctgacagtatggggcaactcagataggtttgtggttgtggcgattagaaagtcaagtccgatgccatattgttccccaccggccatgattcttcccgaaattcttttcccttcccacacccctccctaggcccacgttacagagagctctatctctcgcctttcattctggggattgtccttttttgacttctgacatcctgcccctttaatacgtgtgcgtattaatacaagtcgcaagtaaccggttaactccgtttgtgcgcccacaacactccaatcggaccaacaaaatccccaagggaaatctatcgcaatggcgcccaagaagaagagtaacaagaggcaggaagaggactgggaggctgatctcggcgagtccgttcccgccgccgctcccgccgacgagcagccccaagaagatgccaacgaggaggcagcgccggtcggtggccttatggctgctttgagaaaaaacaaagccaagaaggctaagaagggcaagaccaatgactttgtcgagggtgaggacgccgagggtgtcgatgctttggctagcaagcagcccgaggagggtaacttcgatgatgacgatgtcttcgctggaaagaagaccaagcccatcaaggaagtggttaagcctgcggcggaagagcctgagggcgagttccgagtaaagagtaagaaggagaaggagcgtgagaagaaggagaaggagaagcagcgcaagaaggagcaggtaggtttttacatttttcgccatgctggaaatacgtgccgggtgtccagctcatttactaatcggtctttctctcgtctacataggctgccacaaagaagaagctcacccctgctcaagaaaaggccgaagccaagaagactgccgccgctgaagccaagaaggatgaagccgccgccgccgccgccgcatctaccacagagactggcaagaagaagaagctccctcctcacctagcagcccttcagaaacaacaggagcttcttcggaagcaacgtgaggaggaggagcgcattgcagcggaggagaaggctgccgcggccaagcagaagctcctcgatgaagaggaagagaagaagcgtgcagaggctcgtgagcgcaagaaggagaaggagcgcgaaaagaaggaacagctacgcaaggaaggcaagctgcttaccaaagctcaacgagaggccaaggagcgcaatgaattgcgcatgcagcagatgattgccgctggtgccaaggttgctggcttagaggagggtggcgaaaagaagcagcgccctgtatatgagaacaagaagaagagggctggcaagaagcaggaagaggacctcgaagccgccgccgctcgagcccaggctcagcgcgaagctgaagatcgaaagaaggcggccgaggagaaggcgaaggctgaggccgccgccgctgccgctgctgctgctgccgtcactcctacggaagaggacgccattgaagactgggagcaggctgccgatgaagatgtcaaggacagctgggatgcggaatctgatgaggaagagaagcccgctcaggaggcaccttcccaaaaggatcagaaagaagaatccggctccgagtccgagtccgactccgacgaatcatctgatgaagattcatctgacgaagagcaatccgccaaccaaagggccattcaggcaagaaaggccgaggctgcggagcgaagaaagctcaagcacgaggaggctctggcggctcgttcgaaggatgatcttcgatcccctatttgctgtattcttggtcacgtcgatactggtaagaccaagctgcttgacaaaatccgacagaccaacgtgcaggagggcgaagctggtggtattacccagcaaatcggtgccacttacttccccgtcgatgctctacgcacaaagacccaggttgtcaacaaggatggcaagttcgagttcaaggtccctggtctgttgatcatcgatacccccggtcacgagtccttctccaacttgcgatcaagaggttcctccctctgcaacattgctattcttgttgttgatatcatgcacggtctcgagccccagactcttgagtctatgcgtttgctgcgtgaccgcaagactcctttcatcgtcgcattgaacaaaatcgatcgtctttatggctggaagaagattgataacaatggcttcgaagatagtttggctatgcagaacaagggtgttcaaaacgagttccgcactcgtcttgaggccaccaagcttgctttcgccgagcagggtttcaactccgagctgttcttcgagaacaagtctctgtctcgcaacgtatctctcgttccgacctccgcccacaccggagagggtgttcctgacatgctgaagctgctgaccagcttgagtcaagagcgtatgactaactcgcttatgtacttgtctgaggtcgagtgtacggttctggaagtcaaggtcattgagggtctcggtaccaccattgacgttattctatccaacggtattcttcgcgagggtgatcgcatcgtaatgtgcggtctcaacggacctattacaaccaatattcgtgctcttctgacaccagcaccgctcaaggagctgcgtctgaagtcccagtacgttcacaacaaggaggtcaaggccgcccttggtgtgaagattgctgccaacgacttggagcacgctatcgccggttctcgcatgcttgtcgtcggccctgatgatgatgaggaggatcttgaggaggaggtcatgaccgatctggagaatctgctgagtcgtgtctcgactgatcagcgtggtgtcactgtccaggcctctaccctaggctcccttgaggctctcctggagttcctcaaggtttctaagattcctgttgccaatatctccatcggtcccgtttacaagcgtgatgtcatgatggctggtaccatgctcgagaagaataaggaatatgctgtcatgctgtgcttcgatgtcaaggtcgataaggatgcgatggcctatgccaacgaaatcggtgtaaagatcttcaccgccgacatcatttaccacttgttcgataacttcactgagcacatggctcaaatcacagagcagcgtaaggaggaggctaagcttcttgctatcttcccctgtgtcatcaagcccattgctgtcttcaacaagaccgaccctatcgtcatcggtgttgatgtcattgaaggaagcctgcgtctccacactcctttggctgcggtcaggaccaatgccgctggtgtaagggagattattgatattggtagagtgtaagttttggttccctggattttttcccccttttgtctgatttctgacgcaatcgtttcacagcacatccatcgagcgcgatcacaaggctgttccagtttgcaagagaggccagccctccgttgctgttaaggtcgagggtccgaaccagcccatgtatggtcgtcacctcgaagagaaggatcagcttatctcgcatatctcgcgtgctagtatcgataccctcaaggagttctaccggtccgaggtatccatggaggaatgggctctggtcaagaggctcaagcccgtcttcgacattccttgaattcagtcttagggcttccttccggtgtgcggtgtcttcatatcaaaagtcgttagcaccggactcattccagccttgcggtacctatcctcaagcgaacttacgatcaaatgccagtaagtggcgagctttgttctccgtcggccctcatggccttcggttccatcatagccagtttggaggaaacgaatcgaaatttactaagctatgacaattgctatcgaaaaacggaaaagttattctattttgattacgatttgaacatacaatgaatgaccatgacttgatggatgaacagcgagagaggtcgcttgtacatgatataggaaaagcaaggcctggtcgataccagatcttttgtttctgttgttatagtggattgaactgatactattcaagtatttgcattagcgaacagacatttggactaccatgtagttgatctttatcttcaacgcagaaagcaagcagaagcaattgactagtttaggagctagggagatctgtttcttttctagcagagaccaaatcgaacggttgcttcacaatatcagaatagaccagctgatctactcttcaaggtcatattcagcattatgtatgtaatatgtacaatcctgttctcaaccgaccaaatcacctttggatatcaaacactcggcaaatgagcactatttcagcatcaagatttccctaactcaaatatcatccccctcccacctctcaaccttcccgccatgtctctcccaatccaaccaactacccatataaaccccgatattggcagggtcatatccagcctgcacggccatatgcgctgccgtcttagcccgcacaccagccttgcagtagaagaccatctgcgcaggctcgccctcgctctccacaggatcaggcttagggaacccgaaccgggtctcgaactcgtccggggtgagatacaatgcgtctccctgtgatgctagcgggatgcagactgcagatggaataatacccgtacctttgagctcggcaggctcgcgcacgtcgatgagaattatgggcttgtgagttggggagttgggggttgaggatgggagggcggcgttgatctagatttggttttgtcagcttattatcaatagcttcatggctgggttcattgtggtgtttggtccaaataaggaagtaatggtagaggaggaggaatgacaacagactggagagtacatacatcttcgaagccccattcctggagtttgactgggctggcctcatcgctgttgcaccgcgtctgcacctggcccagattcttggtgttccggcttgccttagcttgggtgctgcatgctggcggcaggcggctggggaggacacggttctgaggagaagtgaccagtcctctcgtcggtgcggagagagctcggtgcaaggccgcggctggtgataccgcactgcgtgccgagattctgactacggcggaggacaacacgacagcagatcgctggatcttcgatggcaatgtcgaagccattgtttcaactctggattttgattgtccgcggaggtgaggagttattacatctccgaacgtaacctcgggactgtgatgtcagtatctgccgtgggtgaccgcctactggtttaggcttttgttcattatgcgaggcattgtacaagctttgtcgagcaatattgggatttttggttggctagaacgattcggttgattaggttgtaactagggagggttctttagtagacagatgtttcgtttgagttttgcatagatcttgtagagatggcacagatatcacagatatatagtggagtgtatgtatatcaaatgaaaacctgtaattgagaaattcactaaaaccatacatagaaaaacgagtctagtcctttctctaaactcaaaaaggctatattgacctttaacagatatcaggtttaagattgtgataaaaacctcccaaagccaacctgtaaaccaagaagaaagactaaagagattaagtatataattagttgattcaagcacacgaacagttagataacatgtcataatattcaagcagaaaaagataattaatattgttctaatatgcatggctctaggagtagtcactctgaagaaatgaaacaagaaacccctgcgacccctcacgggcaataggtaatcataatcgcagcgggggctcctttggaaaagggtatggaaggtctctctaagagaaacatatgttaaagacttgtcctatatcgagcatgcatcgaagtcgaatgagagagaagaaagtgtcagcggaccatcccagccccaggacaggaaggcatcataagtcctctgtccagaaagtgtggctgggttccagctttgcttttgtgttttgtacaaagaagagaaaattcaagggcgggcgcggaacgtaagaagacagtcatcctgatatatattagtgaattgatcggggtagaaaataagcttgaacatacctgagggaaaatggtggcaaacaccttgatatcctcggactcgggagtaggggtgtgctcccagtccatcaccatgctggcctttccaatcatggacatcagggaaagctgagcataggtctgacccagacagtagtggggacctgtaccaaagaccaaccagttcttggtctgctgctcagcggtaccggtgatccagcggtctggatcaaacgagtcggcgttggggtaagcctcctcgtcatggcatgcgggccacacggagggaatgatcatcgagcccttggagacggtgacagtctcgctgatagggaagtccttcttgaccaggtagggaaccatgatgacaggggggcggtagcgcagtgtctccttaacgacggcgcgggtgtaaggcatttggtctagcatatccatggtggcggggagagtgcgatcaccgttgcggacgttaaggttctcttcacggaccttgtccaggatctcggggcggtcagccatcagctggaacaaccaggtggaggcggcactggttgcatcctgggaagcgaacaggaaggtgaagatagtctgggcaatttcgaaatcggagaattcacgaagaacctggctaggcttctctgaagaatcgacctgaattcccttctcaatcttctcgcggtatgcggcggaatccagctgggccttaacccaggcgtccatgatgcaggaaatctcaccaccagcagccatacgggccttggacttggcagcacacttggtgaactcctcaagtaccatatcagcggccttcttgccgtaccaggtcttagtgtagggaaggatgatagggaagttcaccagctcaagcgcggcagtaatcagatagtagtcatcggcaattttctggacgccctcatcagtgatatagtaaccgacaaaggtacggcacgacagagcgcacatgagctcgcggaactcggacatccaaggggtcggggtgaagttggtggcggcggacttctggaggaatttctcgttgtaggagttgaagacctcctcggagcgggggaggtacatcgccagagcctggcgagtgaacaacccgttcagacccttgcggtaatctacatgggctttgccatctaagaagacccaattggtcttgccgagaagcttgtgcgcggcatccacgacacagggcttgacatagccgggcgagttgaaaatcttccgggacatatcacgagtggatgcaatcacgacgaaccttagtagaaagtgttagagaacagacccgaaagaaacaagtacatcagggacttctcacttgtggaagaccgacacacagctgaggtctccgctatcccatttcgccttgtattcggtgaatttggggttgactgattggaggaatgggcccataaagggaatcttgtacatagggccaacaatcgcacccttgaggtagtggtatttgactgcaaatagggggtctgaattagtttcaagacgcgatttcaaaggccacacatgtcgcatttgcactcacactgatcatagatgacggcggcgaccaagaaagtcaacaggcccttccaaatcgtgaagccatccaatacggtggcaatgagaccggccggcgcgaaaagttggggcgagaccgtcgcatccgccgatggcgaggcaaagctcccggtgaagttggccatgttgaccatactggggagtcaacggagtcaaagttccgggcaggaattgaagagaaaagtaattgctaatgagaaaggaggaccgaatcccagaacaaaaagggaaaaaagtgagtggagagagaggggggagagaactgactggggctctcaggggcgggaacgccaattacacggaggcccccgggatgctcagcattagcccatatcaatgcataaatagtttgtgtttcgaatggtttacgaaattaacatacaatagcttctgtaagattggattcttatgattttattgattatttgtacagagatattcttacgcccaagttattatttggacaatctctgcttaggcccatagttcgggggttcttagtactaatctccgagccggacttaatagtatcgaagatgcgcaaagataacgaagtcacgaatagcctagaatgagatatgtacatagtatggagtacctacagctacacatacaataggacaactatatatgtacgtactccgtttgtatcttaaaatacagacaagtcagcgcaacgccatatcacaattactcagcacgacgtgaccccggctagagaattcccgagagttagatcggcgctgattggttgaacgttgattggctgaacatcatgtaagggctcctatatgcacgtgcttgtgcttgctactacaacgtacatgtcgtactacttatgttgtacatattcacgataggaatcaatgggtattcataacatggcatctatgtaaggggcttcagcgaccaccgaaaccaaaccatccacgacgacctttcgtttcttcttccacgggaccttgggcttgagcttgtgtctgagtcagagcctcctgtcgctgaccaccttcacgtgggtaatcaatgtagttccatgccacatcaaggaacaagggcttgacaggaatcggctgcatttgaggtggatacggtaccaaattattgaggtctagtccagatcctgcaaattgttgcagtcgttccaccactggccgttggctcgactgtgacgcctcttccgcagtcaccttctccagagtgacaagtccacgatattgagcaaccagttctcgcaaggttgactccaaggtactcgcttgcacttgggatacgtcgagctttgggacatcttcagcatccgttgctgactggggggaaacggaagcggcaaggttcaaggcttgggaaaacagcgcaagagcctcctttgatctcgaaagcactccatgggatcttcctaaagcaagacatctacaatgaaaaaaaattagagattagttgcgaaaatcggtgaggatcatggtgagaaccatacctgagggcacggaagtagtgccgctttgcctctagaccctgcacaaaggccgagtcggccgcaacacccggaagctcgagaataaattccaagctctggagtgttgaatcatacaggacgacccgctcacggagtctattcaacttcttgccattgcctgtggtgtgcttcgcagtttcctttccacttgttgtgggttgctgttcctcaaatgacaagccgtccctttctccacacaacacccggttacgaccgacccgccagccaaccaaagtgtaattcactgcggttcgagtgatttgcagggcctgcattctcttatcactgggatcaacaccctcactagccaagtcatcaatggcggatttcgttgcatcgacagcatcctgactggcaataatcacgttatcatacgcagcagctttctccttagcagcggcggactttccagcatctgccaaccaagtagtgagccgagcctccgcggctgaagcagcagccaacgattgagaaatcgaggcgtcgtccagtgggacagtccgcgacctccaagtgacagattggggcaactcctgcacttctccctccgcagtgcgtcgagtaccggctgcttcttcagcgagacaagaggggtcgatcttctcaacctcagcgcaaatctccgaatccgacgggaagaattcaatcgccagtgatgatgtgggtttggaccggggaagcttcatctgataagccgcgtatcggagactagggtcaacagtcccagagaccaggtcccggaaagcgtctttcttgaccctttgacctaaagctgtgtaaatcactcttgcaatggaatagtcctggagacactgttcccatctccgcttctcaagccacagggtgccagaaatcatcgccaaataagcccgagactccaggatatccatatcacttgccccagaaagcgattgttcgtgaagcagcgacactagatgctgtgcatacccagtggccttgttcagtcgcgaaataatgtgacgccgagcagcaccagagatgccctttgcggaagtatctgcggaatgtgtagacttcatgtgcattgcttgcgcccaagctcgttcggaactaagaagcaaaagatgtacgtatctggcgtgggttagaaactaatcgaaagagtaactgggactggaaaggtaagcaacatacgacacattgcttccaagattctcagcagtcacagctggtttggcagtatacttgcggcctttgacagtggcctgaccaagcttcttgcggagtttctgcagttttctggtagtgtgcgcccggtaggcattgtagtctcccacaaggagcgcctcctctctctctttaaagataaagtcagtcacctccatgacacttttctgtcttgttcctttatttggggtcctagtgatgagaatgtgagggacacggttgaagtagtgggctcagcaaaggcggtgaaaccccggcaatttcatgcacctccgaatcttttgctttgtgttctccaagcttatgggacctcggatttaccattgtctctttgttcaaatcaaggtgcttggaccttgattggcaatttatgtccggaacctgtgtgtgagcaacattgtgtttcacaagccgaagagtccgggcttcctttcctggtacgaatggcaccaccaagcacaacatgctcaattgcttgtcatactcaaagttaggacattttgctgacagaataattatccagacagagcttttgaacccaatacaatacagacgacggaattatagcggcatcttaccgcttgaggctacgattgagggtgatgctcgaacgtgcaacaagctcccttgagaacgcgggacggcgtttccttcaagactccaatggtgtgatccgaaacggaagctgtctctctggtcatttttggaagcataccggcgttggagcgaatgctcctcagtggttcatcgcgcttttgcaggcgtcaggccaacgatcgtcccccgttcttagcactcaacacgaaagcagagagtcaagcgatgggataggcccatcactcgaattcttataccctcagcaggctcaaactttagtagcttcgcgtctgcctcgctcccaaaacaggactgggtttcggaggagacacttgagcttttcaaggtcttatgtttctctttcaagtctttgccaagctccatcagaggcttcatccaggcatgaatatgcaccaaagctggcccaagtacctcaaaatccagaatctctccataaggacggcgaagcgagcgcatccctccaggcgttccttcaggagaatggcagcgaatttgataaagcttgggtgctgtacgttgcagctggatgcccgtcgaaactcaagtctgcactctgtgcttatatgagtaaatcaccgaaaaaaaaggatcaacgccgagcatggacactcttcaacgaaatcgcacccaaagatcgcactgacttagacttcaagaacatcataaagtcacagattctgtcgctacccgagaatagaccccagcatttggaggagatctgccaggaagccatttccactccatttgcccaagaaatcatctcgctgggcctgatgcacatgatggcaaacagacagtggtctaaaattatctcactctggaagaagctattggcgacccgtgcgaatgagcgaccaccattggacttttttctagatcgatttgatcgatttcacttccctgattattccctttcgaggcatctccttgctttcactgcgcacctgataagtgccggcacggttagtgcagcagcaaatgactttttgcgccgtctaattgagcgatttattagctctgatgacatggtcatatccacaccgattccgactttgcttgaactgttgcacaaatgccgtcctcttagtctcccgaccacaagacactatttcaatttgatacaagtcttcctacaatcagagcagaggccggaattagtcaagtgcattcttgtttaccgctactttcgttcaagatttccggatgaaaggatgcacctcaccactattcgtgctattactcaacgcgtggtgaaattcaagatgaccgacagcatgctatattttttggacgaagaggcgcactttgatgaaaataaaagaccaagcatgttgtcgtacaatgaagccatgagtgcattttcacggattggggatgtacgaactgtccaacacctgtttgataggttcctggcagatcacggccacccaaagtttcatgggtcggtgaccccccttcttgctgttcacgcgcggttaggtgatgtgcgcgagacacggcgacaattcgagcgaattcctacagaatttggtctcccggtgaacacaatttgctggaatatactgcttctggcgtacactactgccaaggatttatcgggtgctctttctctattctcagaaatgcgagaaaataaagtacccttcaactcgtacacatttggcacactgatggcgattttcgcccagcgaggcgacgtcgaagcaatccgtcaattgctcaaagaggcgcagaaaagtcgagtacaaatcacgagaccaatgattgaaacggccgttcaagcatactgcaagaatgggcaattggcccatgcagaagagcttatcgcactgagctgggatttagcggtgggagggtctcccttgcgaatgtggaattttcttctaatgcggtatgcattcagggtatcaaagttttccttccgccgtgtccttgaccgcatgggacgcctaggattgaaaccggacgacatgacttacgcggctgttatgcttgcttatgtctatgctaagcaggtgaatcgtgcgcaagctaccctcaggaagatgcatgaagctggttttcaagtcaccgagcaccattattctattctcttgcttggatatgtgaaggaacggaaccgtgatatggtgtatgtcatctcccgcgaaatgcaaaaacgcttcggtcgaatcgggatggaggagagccttttgagcctgagaatgcagattgcgagagacgtggagactgcaaaggatctcgaaatccctattgaagatatcgtgttggagaacgcagaaaagacgcttgctgaatcaatctcacgattcaatgccaatccatcgccagccaacagtcgattatctagaccgttagagggctttgctgttgagtctttcactgccacgcactatcaacggctgatcgacgcatacggcatcgtaggtggtgccagaaaagcactcgaaacttttactcattacatgcaactcagacgaaccgcgggattatcggacggcgatgatttgaaatctttaccgattgacttcgtcaaagccgttatgaatgccttttcagaaacccagaactacgagaaagtggaagagtgctggaacagtattatcgcaaatgcaaacaaggcagccggtacctgcgaccttgacaaaatcttgtcagcaccgtcgccggagtcaacgctgccagcatcagatgtgtcctctctcccgtcaattttttcaatgtccactcaggcagaaaagcccaaaatcattcctgctcaacgcttcatcctggactatccactttcgctttacctgcagtcgttggctcgacgaggcatgttcgcgaaaatgcatcaagttgtagccgaagttcaggcagcaggctttgcattgactggtttcaactggtcaacttacgttaggacgcttgcgacatctgatcattatcctgacaatgtggaggcatttagacttttcgaagagaagttcattgttcatttccctggttggtcgtggtttctcaaaggatatggtgtgagaccacttaacgcccccgtgacaatcctccacctcgaaggtcgcgcgggtatcaccaaatctcgcaggatgatgggaaagttggcccgaaagcattggcgcaaaatcgaccccggttacatgcaccctcattaccccaccatggtgcaactagcgagcacattgcaacagctccggcaaaccagtattacggaggggaacgagcatctggccaatctctacaagattgcgccacagactgttgatgcccttgccgcgatgccaaccgtggctgataaatatcagggctccatacttcgcggcaaggcggcaaaacgcgatatcctcccacgcccaacccatctgtcctcctcgcactctggtgctcttggccccagtcgcgacatgcatgaacgcaccttcgatgacgcgactaaggaacctctcgtgttgagaaaagaccaacattccgagcccgctgtcaacaatttaaatcttactggcttactcgccgttcacgaagagggattattcggcccgttggcgagcatccttcctcgcgaggaccgagtcgacctggaaactacagttcacgagtatcgcgttacggcacaacagtggaaggaccgaatcaagcattaccacgaggttattgctatggcgctcaaagacagggatataccacgcgccgacgcccacaaacgacgtttggtcaagttgctatattccgacgtcaagagcccgaccgccaaacgacaactgttcgacaaggataatcgcaagtggaagctacaaacccctccctaccttatgttcaagcccattgccgggctccatgtaaaacctgggcggacgttagcgaagcgagcgtccgtgcgacaaagatacaagggaccctggacgcccagggaagaccagggcgacgaccgttgagcagcgtgctccattccatgtatagtgattgtaattttagcttgtttttatatatcatatttgtacaatacatcagaattttccacctttcattggacatcactggttgaatacctccaactacatagttaaaagtcttttgtaccctcctcttctaggacggagaggaagtagtattactaggccaaacgtccgtaatcacatgacaaggagtagctcggttatacatgttgatgtatgtacatctagtaaatattattgtcggacagttacaagcctataatttgtgagtagaatgatgcatttttcaccacggagtaggtaaacaagaatttaagcattagaaagaagtatggctagcagaaaattcaagaaatagcagaaagccgatacttaagatctcgggcagggtacaatcccctaatgtataggctatatcaatcccccagatctatgtctacttgattgaaaaataatgatatggtggagacaaaggtacacatctgaaggtaccttttgtatgcgcatccaatagaaaaggtacatcttgcatcagacccatgagcccgaactcccagaggagttgagcaggatgttgggccaagtgtttattttgacgtgggatacagagtatagaaaactaataaatatcgttttgaaggggaatttgaatagtgagattattttcagatagctataaaaaaaaaaaaaggccaacacacagcgctccataccatcaaccgaatggaagaggacctttcagacctcctcgacacccaccaggaccgaccgaccgaagtcagacgtcgagaccaggtcaagatcatcaccactccctagaccgaaacacagacactgcgaacagcacgcgtgacagtcgaggcgggagtaaaaaggtttcactttagggcatcgaggacatgtagtcatcagcaagggtggagattctgtggctcttttaaagagtttagaaaggggacgtctactctaaagtgattctttgaactgtgaaaaggtcagcaaaatgttcgatcacagtgaaaaaatggttttctgctgtatgggggggaagaacatacgtagagtcgcttgaaaaagagaagaaggtctgggggcttgggcttctttatattcctgccgggcacgctagtgctaagcgagattgtcgtgtatttgtctggtttgtctggtttgctttgtagaggaaaggaatgttagcaaaaagttcaaaatgccatgtccagtgaggaaaaccagaaggtttcctgctgttgggggggaggagaacgcacgtagagtcgcttgaagaaaagaaaagggaccggggggatggcggcttatatagcccagtgaaaaattattttctgactcagcacggcacgtggtacccgggggacgcgctttcctcgcgtgcaacttcacgcgttccactttagcaaatcgggaaatcccaatcggccctccactccctccttcctaccacactatattgcatcacacaccatggacggtttacaactacgtgatgaggccgcgcaggatcgcgttcgtgctgcaactgaatttcttgaccctagtaagtccattgagttatgtgttgtgatcccttgagctaacaaagttctttttttcagatgatgcacgggcacgcaggttcgtcgacctcgaagataaatgtgaaatatatatctaacgggctggaacagttatcgagcggacattgtggttatgctgaacaagggtgcgcgacgattgacagtgcgtggatctgcgaaattccctgctagtaggtgatgctgatgattttggacaggtcagcatcgatgatatcagagcacataatcgggagcttgccgatgggtaaattgttcctcgacaccaaccgaaaccgggttcaccgactaacgggtataggctcctctcttcgccgttcgattattcacaagcctttgatgcagctttgaaggcggtcgttaaaaccctacccggtcgaccactcaaagaatcttcagatgaagcggtgtgtattaggttctcaatgattcttagcagacatggaacgtctaacaatatcaatagaactactactgcgcttatgttggtgcattcggagaattctcttgcaatccgcgcacattgggctcggaacaattgaaccacatggtctcgctcgagggaattgtgacaaaatgctctctggtacgccccaagattattcaaagtgtccactacgtcgagagaaaggatcggtttgtcgccagaaaatatcgtgatcaaactatgagtgccagcggcgcaactagtttgaacgtttacccccaagaagacgacgaaaagaatccggtgagtttagcctggacaatctcactcaatcagttgaaactaatgatagaatatctagcttattacggagtacggctactcaacatatctcgaccatcagtcgatctctatccaagaaatgcccgaacgtgccccggcaggacaattgccccgaagtgtcgatgttatcttggacgacgacctcgtcgacactgccaagcctggtgatagaatccagttggtaggtatctaccgtaccctcggcaacggaggtagtggctcgtcgacgttccgtacagttgtcatggcgaacaacattgttcagttgtcctcgaagagcggtggaggtattgcggaggctgtgcttacggataccgatattcgaaacatcaatcagattgccaagaagaagaacgtgtttgacttgttgtccaagtctctggctcccagtatttacgggcatgaccacatcaagaaagccatcctcctgatgcttctaggtggaatggagaagaacttggataacggaacccatcttcgtggtgatatcaacattcttatggttggtgatccgtccactgcgaaatcccagcttcttcgtttcgtattgaacaccgcgccactggcaatcgcgactaccggtcgaggttcctccggtgtcggtttgactgctgctgtcacctcggacaaggaaaccggcgaacgtcgattagaggctggtgctatggttctcggtgaccgtggtgtggtgtgtattgatgaattcgacaagatgagtgatgtcgatcgtgtcgccatccacgaagtcatggaacagcagaccgtgacaattgccaaagccggtatccacacaagcttgaacgctcgctgcagtgtccttgcagcagccaacccgatttatggccaatatgatccccacaaggacccgcataagaacattgctctccccgactctttgctttctcgtttcgatttgctatttgtcgtgaccgatgatattgaggatgctcatgaccgaataatctcagagcacgttctacgcatgcatcgctaccgccagcctggcactgaggagggtgcacccgttcgggaacagctcaatcaaacattgggcgtcggaaatgaagatcgtcaagactccaacgcgccaagtgaagtttttgagaagtttaatgtgatgctccacggtggtatggtcaacgctaccaatgctggccgccgccgtggcaaggatgtggaaattattagtattcccttcctcaagaagtatatccaatacgccaagaagcgaatcatgcccgtcttgaccaggggtgctgccaaccacgttatcgctgcatactctgctctgcgaaacgatgaactcaccggcaacaagcgtcgcacatcgcccatcacccctcgtaccctggagacactgattcgtttgtctactgcacacgccaaagctcgcctgtctaatcgagttgaggagaaggatgctaaacatgccgaggccatcctgcgcttcgccatgtttaaggaagtagtcgaggatgagcgccggaaaagacgcaaggtgaccaccttcgatgattcctctgacgacagcgatgctgaactcgacgacaactctgatgatgacgccaccgcccgcggcacctcaaccgccacaccgggtagacgtactggcacagcacgcacccgcggtatcgcaacgcaatctagtggtcctgtcccagacgaagacgaagacccagacagcctatacacagccagccctcgcgctcaacgcttgcgttcgagccagacagctcgcactcaaacccaaaccgactctcagatgtcaatggcatcctcaaagccagcctcgcaactcatcgagtcccagacagactcgcagtccacttccacagacgtcccgatcacccctgcccgcatgacagtgttccggcagactttgggcccgcttatgggcaagactgtgtttagagacagcgatacaagcaagattgatgagttgattaatgctgtaaataccgccatccgggaatcgcctcagcttggcgcttcgcacgtcttctcccgccctgaggctatccaggccttgcgagtcatgaatgacgacaatatcctgatgtatctcgaggatgatgaagatgtgtaccgggtctaatttacctgggttatgtggcactgtctatacttctcttctccatctggtaatagccagggggagaatgctggatctgtctgcgtccagttttacgagcatgctttcttgcctttgcattgggattgatatcagcatgttttgttttattttgtgtttggcgtatgggatgggtttgtgaggaaatactactgggtgggctcaatacgagaaatatgaatgaatactcgatccttgacttaaatcaagacctgaatggtagtactaggctcttagtccacctgcaattgtaatttaatgccacgctatgtgatttattagcagacacttgtttatttgacactataagatgcattggaatgggagttttccaaaggaaccagatacaacgcgacagcatacataggcgaggtactcgagcatgtctatagaagtaacgacatcgcgctctaaaggatatgcagcatacacagctaatgcaagttcccaaagacaacgctttgagcaacaatgtctggaaaacacgagagacaaaaaacagggtatagagatataaatggcggaagcatgaataatattccgtgctaaggtgcggtgcagtattacaattccggaacagaattcggtatagcctcctctttatctttctcaagcatacccataggcaacacagagtcgtcagacgagaaggacggggtacgtataccctctctgatctgcgcctgcgtgagaggtgacaagccccgccgaagcgtcgagcccttccgtttttgctgctgcgggctcgcatcctgcccggaggcggtgctcccgcggcggggcctactggaaggggaagagcgggaggggggacggtcttcgaagctcgtgtcgacgggggtagtgctgcgggatgacgtgcgggaatgagactcggagcgggtattgcgacgggagggaccccgctgctcttggccgagtttcgtgatgggatgatggccgtggcctgggcggtgttttgattcttgctcgagtgagcggtgcagggtccctgcgacgaggcggcgacgttgggaggcgcgccagccaagcccgagccggccgagccagcctccttctgtttgggcgaggtggcgctcgcgctcgcgcagtttgaggcgtagctgggcgcggcgctcgttttccttttcccagaagtcagtgcggtaatcgtcccagttttcgcggaattctggggagaacgacttgggcaggaggaggagacgaatgtagtcgcctcccgggctgaggtcttcttctaccatgccggactcgctgtcggtgccgttgtagtactgttgatagtgctgccgaccaccaccagcgcgcttatcggaggggctctgctcaacgaaatggtagtttccattgggggagggtaagaacggggcggagaatgggaacaggaatgagatgtaagacagtagctcttgccagaaggggccgcgaatgataattatcttggtgttcatcacgcgcaggccacgattggagacagcgagccagcgccgaggccatctgatccctcgttcccactgccctgtaccccagatgagcagtgcggtaaccaccccgccaagcagggcgactttctcccccatctctaccacccagtagacagagccgcctaccccgcggccatcttctcgcgggcgaaggaaaagggcatatgcaaaatgggcaagccaagcggctagtagaagtaggaagaacgtgttctggcggcgacgctcgcgcagggccagatattgggctcgtagcgaggtttcaagtattaagaggtttaggtagatctggggcggggaggatggcaggtgtgccagcgggtctggggtcgacggacgtggaggggaggaatctgaacggtgagcttgagacgaccttgaggagttcaacggctctggagttgatggggcgctcgcgccgggtgttggggcacccttgaccacctggtctaagggtgaggccatagtagaagagtcccaagatgatagtagaatatgaaagcaaagctcgttggttaaagtcaaatcaaaacttggccgatccggcccagggcgagtgtcattagtgtcattgcatgtgaagaggagagagaaaggcgggagggtgaaagccaagttggatcgacatcatctgcccagttagttgacttcacttttatacctacacaaatattgcccattgccattaacttaaggggtttccaccatatttgtcttttcatcgactctcttccttcggatattacctcttttgcccggagtttcgcatgtcagacctaccggggttaagcggagtgaccgaattgtctccgcgttccctgcttatacgtccatgagcgccaccgttcaacttttgctagcagaaactatctgtcttcccaatttgcgaatcgcaggcacaacttcgcgacttgcttctctcttttcagccactcaacaccaggccaaaccttgctcagccgtcttcgccaccctcccacgggggcacagactgtcttcaatggcgtcagaatcactcaactcgtcccatgagaacgtccatgggcgcgatcaacacttaggtgaaagcaatatcgagagaactccgggaacgccatatgcggctcaggctgctgctggcgcggcagcggcgcgtgcatttttcccgttgggatatcgagaaggctttagtcaatgggtaagctaacaattcaaaagccttccattaccgcatgtctgctgatgatttgatttacatagtgggctcgtatacctgcagctactgccgaacacaaagtcctctcttatctgccttacttgcaccaccagccccccacccacctccagactggaaaaacggcagagcttccggatggcactatcccgaccagtctcgagagcgcagaccctaatcaactggatgaagtcaccactaactcccttgatgacccttatggccctcgccgctggcgctctagcatggtagaactgagcgggaaagaccgtgcgctcaatgagttctcggtggagagggttggcgaggaagcagaccaacatttggtcatgctccacggctatggcgccggactcggtttcttctataaaaacttcgaaccactgagtcggttgaagggctggcaactccacgccttggacatgctaggcatgggccggagtactcgaccctcattcaaaatcaaggcaaaggaaagagaagacgctatcagggaggctgaggcttggtttgtagatgccttggaggaatggcgcatcaaacgaaagatcgatcgctttaccttgcttggacacagtctcggcgggtacatggcggttgcctacgcgctgaaataccccgggcatctaaacaagcttatcctggcatctccagttggcatcccagaggacccatacgctgtcactgcagatgtggccgagcctcgggcatcgacattgtccaacgagcttactcaagacgagcgagatataacttcgtccatttcggaaacagcaccgaagacaaccgacggtagctttatcactgggcgccaaccactcccggctgattccgcaccacctccagctccacgacggaatctccctaagtggttcgcgtatttatgggatgccaatatctcgcccttcagtctggtgcggtgggctggtcctctaggcccacgtctcgtgtccggatggacctctcgtcgtttctcccacctaccagccgaggaagctaaggcactccacgactactcgtactcgatcttcagtcttcgtggtagcggcgagtatgcgctagcatacattcttgcccccggtgctttcgctcgtagtcctctgatccaccgtgttcacggcctcgggagacaactgatccaaaacacaagcccccttgctcatccagccgccgccgccaccacttcgtcagcgccctctgagaatacgaccgcctctaccgccactccttcgtccgactcttcggcacctgctcggcgcgagaagggtctccctgtggtgttcatgtatggcgaccacgactggatggatgtctcaggtggtcgtgcagcagcagctatattggaaaaagaaaagcggaaagccctagaaaatgccaccccagaggagaagcgtaccgacgaaggttcctctaaggtggtcgttgtgaataaagctggccaccatttgtatctcgatggctgggaggagttcaatgatattgtgctcaccgagatggaagaggtcaaccagagggagagaagtcgtcagtaatgacgtggataaggcttctttccctttgtcgtgaacaacgacctattaaatttagagctggagtgtgatgttaaccttcgtccctcgtttattgtggtatttaatctctcttttgcccctcgtgttatgtgcctatctccctcttttccgtggctataattctgtacggtgcatattgactagatagacttggacagaataaatgacacttgccatgaatgctccagtcggagaaacagctttcatgcatttttcatttgtgctctttgcgcctcccccccccaaaagaaaacacacttcattcagctcgatcaccagcagtcagccctctcgaattcagtccaggggtactttgtctccgatgcctagggctagtgggataatgtgccatcaagcgtgctagccccaccgatggagcatcacgctcttccgtcgacagaccaatcccgggagtagtatacccactagcattgggactaaccctgccggagagaatatggctgctagaggacccagggcgcctcaaagaaaagtacccacccccgccaaagctcccgccactactattgctcccgaagctgtgacccagcccatccccagaggtggagagatatgagctcgtgaatggtgcatcgctggcagggaaggcgcgcgggagagcccccgactgagaatacgagtttgaatccagccgcaggtatggctggggcgtcataaacggagcattgagtcgcgctgttggtgacatcatcgactggctgtactccctcgaattaacagcggcggtatcaggcctgtttgacagcgctagggagagtcccatgcccgtgcgacggtcagaggtcgttagcgatgaagtagtgagcgaacggcggtggtgtcttgacccgtcttgttgctgatcggggtagatgccctgcgaggcccttgctcccgtcggcgattggagattgcttcggccattacgccagtcggtgctttcggggctgtttagggtgctttcggcgtggacacttgtacataacatgacgagttgcgaggggagctcgagacggttatttagagatagccaggctcgttcgtctgcatcaatgtctgcgtctagattgatgtcaccggtgctatgtatcgaagaggacgaggccgagcttgtcgctttcccgtgcagagtatgcgagctgcgtgttttggatgcagggtatgagcgccatccaccgacgccttcgaagtctcgcctttcatcgccgcttacaggcaggccgcagatgggcgttggggtagacaagttgtgggcctcgatcatgctccgtgcataagagttccttttgcggttttctgggtcatctaaactgctaccaatggaccaagaagtaagagggtcatttatctttcgtggatgtgtcgtcatttggctggagttccttcttgatctactactagctggagtagtaggttctgatgccgcaaatgtcaataatgatgaggtaggtgaggttggcactgaaaagaaatgcatgaacaattcgtagaatagctcaatacagactactgatagtctgagtatcaatgcaaagagcgcagcggatattgtaacccatgctgagaaaatgagtgggatagagatgatggccaggacaggcagcgcaagcaatgttgatagagagggccacatcgaggagtcaatctatatctccaggaagtggggaaaagaccaaaagcccatgattatacgacattcggtatttaagaccacagtcatagcataaacaacaaattgcggagaaagcatgtgatggatgccccaggcagcacaaacgccaattacatcatttcgctaacttcaaccttgttgtatatcagaaacttagaatctagctttggaggccttgttctggtttccattgaatagcccgagacatgccagaggatgagccgttcccttgggacattggcgtttacgatgcccactgtcaccccaccgacacattggcctcagtggccgacatcccgcaaatgaaagcgacaacactgacaatcatggccacgcgcggggaagatcaagatctcgtacaacaaacagccgtgtcactgtcagccaagacaagccaatcaatggcagaccgcgtagttccctgtttcggatggcatccgtggttctcgcaccagattttagacgacactacacaaccaacagctgcacaaaacccagccgagcacaagtccacgcactatgccgccgtgctagcaccatccccagccgatgaccaaccatttgttgatttacttcctgttcctaagcccctctcagaactaatatctgaaactcggaaccgcctccaacagttccccaatgcgctagtcggcgaagtcggcctggacaggtcattccgacttccgagcccatggactccaaccgacatcgataacagagatgaccagcttacccccggctcacgagaaggccggcgtctctcaaactaccgcgtcaagccggaacaccagcgcactgtactgaaagcgcagctacagctagcgggagaaatgaaccgtgccgtctcgctgcacagcgtgcaagcccatggcggagtctttgaagtgcttaaggagctctgggcaggacatgaacgggttatgctgtcgcgacggaagagggacaagcagcgggatgcagaaggcgccgtgtctgacgacgatgatgatgacaatgacggagataagacgttggaaggatgtgtgtcgactaaagcatctattcccaaagggaaatcgtatcggccgtttccgcctcgcatctgcatgcactcgtacaccggttcggttgagcccattcgccagttcctgcatcagtcgaatccgtcggatgtttatttctctttctcgaaacttatcaatttctccggtgctgctgagaagaaggttggtgatgttatcaaggctttgcctgaggatcgcattcttatcgaaagtgatctccatgttgcaggcgcgcagatggatgagttgcttgaggatgtggcccgacaggtttgtcagctacgtggatgggagttgcggcatggtgtacaggtgcttgcagataactggcggcggtttgtgtttggctaggtcttgcgtttcattttcctattcctgcatgggttgagcatgggttgaatttctgacttgttgcactttcccctcgcggtttttctaagcggtgcaattagcgaacacgcatatatggcgcgactggatcgctcttgtacgtatatccatggatattgcctaggtaattcattgagacataaaaaggccccaactgatttgacccaacatcactatttgcagttatatgacgtggtatatctctatcattgtatgtgattgtttgtgacatggtatcgtaggctgggcctgtacatgtctgtggcctgacatggtctctaagatgtatcgtgtagctgcgtgccctggcatggctcgtctcgtcgtcaaattagaaaaggtatccgaagagtaggcgatggagaagatgacagctctatatatatagtcatcaaccagaggtagcgggaaaaagctaattatgcagccatcctccatcgtgaataagatctgccatcggggcatcctgccagtagatctgccgccattcatcttcaagctcgggcaaaccttcaacgcccacagggggaggtaggtctacatcaccgaaggcgaacagctgtcgccagtccggatagtcgcgagctggctcgatggaatccacttgcatgctggctgaaaaaggatcgttcctttccagcgggccaacattaagccggagaggggcaatccaattattaaattgagggttgggttgtggtgagagagtcgtttgttggagaggggtagattcgggggtgggcaccccgaaagagagtggcccgggggtttgcatggtaattgatggaacaggagaggtaatgggcatcttgtgcgcattatgagtgtcgttgaacggcttgggtcgttctgtggttgccatccgaagatcctcttgcagacgtttggagtcctcgaagagtcgcaggattgtaccagcatgaacccagtattgagctaattcgcgcagcgagtaagaggcagaatcgaagcggcgtaaggcattgatggcaagaactggattggagaagcggagctcaacccggacttgaatcatggccgtgaagagggtatggacgccagtgtaccaaaggaacttcaagcgctcgtgcatcctgagctcttcaaatattgaggctataacccctgcggctgcactgcaaatttctgcatcgtgagggccatagtcatcagaataggccgaggctctgggatgaggccgatgcaacagaatgaggaagttgttgtaggtcaaatggagcatagcggaccaaggatccatatcagatgcgcgaagccgaagattatcaggaagtttcagagaccaggttgccaatgacccatcagcttcttgaagaacggcctttcgccgttctttactttcccgnnnnnnnnnnnnnnnnnnnnnnnnnnnnnnnnnnnnnnnnnnnnnnnnnnnnnnnnnnnnnnnnnnnnnnnnnnnnnnnnnnnnnnnnnnnnnnnnnnnnnnnnnnnnnnnnnnnnnnnnnnnnnnnnnnnnnnnnnnnnnnnnnnnnnnnnnnnnnnnnnnnnngaacggcctttcgccgttcttcacttgcccgaagtccaaatcgatcgcgaatgagatacgagatcatcgtacacagttcggtaaaatggatcacgtagtctgcttgtacaagaggaccgcaattctcaaaatcagcgagcgtcaaaggagacacatcagaatcgtctagattgctaaattgaaagttgattagtattcgctgcaatttggccgtttggaacgacttacatcgcctgaggtcggccatatgacagggaaatcaacacatcaaattggaccagaatgaaccaaaccctccgccacattcgccgatcgcgagtcacaaatctactggaaacgggattacggtgcattccaagccccgtggcgatacgggcagcggccccaacccaaaagtgagcatctgcagcaacatcatcatctgcgctgtccgaatgccacgtcaaaagaagggccgcttgaacaagaatgtcgcgatttcgttcgatgcgattgtcaaacagatacttggtccgacggaagaaaatttctttgagagcgtctcgctctactttagcacgagaaacatgcgccccaactagcaaaatcgcttgaagaagtaggactggcggaggatctgcgggatcccggttccggtattgcgtcatgaataaatcttcgtcaatgatagggtaccccggattgacatatgtgaaataagcctggaccaattcatctgcgagagccggttctggaagtgttagagcatccataagaagctgatcatgaccggtcttcatttgacgccgtgggatctcgttgctcgcaaaatggtatacatcgtcatcttgttctcgttgttgtcgaaacaagaatgacatgttcgaatgttcgtgtccgacatagaaggcgcgcacgcctctttgtatctctctcctgccggattcctcctcgtctatcaatttaacgagatgttgctccatctccgtgtgtgcctcgcgggcatgcgccatatcggggcggccaaatgcctccgatcccgtgccttgctgaaatccatgttgcggaaggcccccagatattggtgtggcatggccgctctgaaatgcagttggaaaacttggtggtagtggtgtccccgctgcaagggtcgggtttgaagtaggatcggaggtgggtagaggccgagatcggatcggaacaggatctaggattgagcgtacagcaagacgctttttcttttcgtgtatgcgacagtcagcctttccagaggcgcgacagttggtacagggtgttccgacggtacgggcatcgcagcgaactttgcgccggtgacagtggacacaagctgcggagcctaagagttttttgagtcaccggtcagcaagtctgatcgcgcaaaaataaccgatcgccgagaacaaagaacaaagcccgcatatcaagatacataacgattaagcagataaggggcattgcttaccttgtttgcgcttgctcaccccatctaccgggagcggcgagggggcgttatcgttgacggaggacatgacaggagtaccattggcatcattcttccaaatcggccacgattctgcattattcgagtcaccaacaccagtcacttcaaggcatcatgggcgaacttcgaaatggttgccgaggataatgcgacaaacaactaaatcaagaaacaaaaaagtcgggaagttgaggaaactgcgggatcggggtctccggtggagactcacgtgggtgcggagaaggcgattatgtaaaaaatgggccaaatcttggaaatcgtatcacaaggtcatattcctccttgggagttgcattattgcatttgatatatcgtgttctccgttaatgcaaggatgtcttcatcttttcttaggatatcgctttggtggcctggatactactgttattccttcggcccacgatgtacatatttgcgatacattacggtgagccacagcgtcgtaggcaagcccgtgctccatgtgctcttcttgaccagatgaccaagagacactccacatctatcgcagcaatccaacattaaccaaaagaattattcaaggattcagcaatacccacttggaacaacatctctcccgtcctaacggagcaaacctggacggtagctgttattctggtggaggtcttcgtctatctctggctatctctgatacgcagagcctcaatgaatgtctaagccacatacccgatcagtctataaaccaggcacatcaagatgaacaataaaccagatgaacatattccctaaacagaacacctatcttaacctctggcttcaattcaagaatgggaaaggaaacaaacgagttcaagcgatcgagcaaaaatatctgtagatctctcacaccgacccccttttatccaagtattttccaacggttttagatctagccaatgaatgctactagggatcggacagcaatgcattcattatacggagtacggaatacaacatacggcctagcaaaacagataggaaagaaagaagaatatacatacggagtgggtcctatcacctactattggtgcgccacaacactagatgtgccctaactcgaacccctgaagatctacgaggctcgtacaacatacggagtatatcggcttcacttccttccggttgctgatctctaccattattgatctctgggctgacatcttcctcgggaacttaaacaagaggccttcatatacaattgtactatgtactgactggatcaatagggcagcattttacgcacggactttatgccagctcagctcttggctgccggcacttgatttaggatttgagatatttgcccaatactaattctcagaaaaggaattagattcataagcggtagtatcatactccgtacaccgtatcccctgttcgctctaattgtgaaggggtatttatctataaggctcttttgaagactggcatgtatgtcataaaagctaatcaggtccaaaactcaaagcagcgtcttgagtgtatgttgtaccgaggcatttcgacctacttgagttgcgcccaagctattcccaaaaatggcgaggctggcagccccatcgggttgcgaaagcttctcgttcttggccattaattacctctggacaacacccctgtgatctacgtacacaaatatgagaatggatacatcaaatgttgtataactacggagtactactacggattatgcactccgtatgagtacataactagttacagagcttagcgaattcctggcttagctgaacagatgatattactgatgatcgtgatggatataacgcgtaaatactgttggactgagtgttctatcttcacttcatatgagaaatggcacttctctgtgtgtatgaatgggctgacatttggtgcactatcactttggatcctcgtccattttccagcttgagtgctatttgatctcaagctgccggatcgcttacgggcgatattttctcagaacctattcactttgatacttccagacaatgcttccaaaattatgtatatagcatgagcacaccaaagagacactagtattgaacaataccattaagtctagcttgtccttccagacctgccttcataatcataccgaagatctccagatctttcctagcatccttcgaagtggttttagcgggcttaccatcaacagcaaatgcataaagctccttcatttccaatgtataagcatcttcgtacgtcttccgaaccacagactcacgaaatgagccatcttccagcttctcgcgaatgtgcatagtggtaggcaaccccttgacgtaaggcgaatcaaagcagaccttgacagtcttatgtccaccaaagacctcaatcgacgcatcgaaacgggggacatcatcaattccggactcataagacacagcaaaagagggatattggaagagggcactggagagggaaaagaattagcatgtttcccggagctgtagatataaaatttgcaacttacctccagaatgggggtcccttcgcagagcatagagaagcaccaagcacagccgtcggcataccaagagcctctctcattgcactaagatcatgcgagccaagacttcccaagtgcctccactgagcagcagtatcaggcgtaactggaatccccaattccgccgtcaaagcctgttcaaggaactcgtccgtcctcgtcgacaattccttcacgtcctctgatctgtaatcagagaaaaccttaggaaacgtaccagactgaccaacgaagtccgagttcgggccgacaatatctcgcacccgtgcatagcacacttgatcaaagcttcctatctccttgacggcatcgatgaagccactcgcataccgccgcatatatcccaccatgacctttccggaagtttgcttctcaagctcgatgagctggtccgcgtcttgcagagagagggccacgggcttctcgacgaagacgactttgtcatgtttcaggcctagtacggcgtggggaacgtggaaggcgtcgctgttggcaatcatcacaatgtccacgtccggggaggcgcagagctcctctgccttgcgagtcgtcttggggatacatccaatgaccttcttggcacagtgctcgagcgcattgtcggagacatcacataggtaggtgacttggaagtaatctgagaggaacccgagagttggaatgtgggcaacttgggtgatttcgccacatctagttggaatatcagcatcaatatggtacagcactttggcaataggcttcttacccaattattcctacgcggaggatccttttgccggtgttcatcttgaatgtgtgaggtgattcccagcttccccaatgacgtaatggttagggaaccttggaggttccaaggttgaaagctgattcaaacaaaagttcaaaaatttttgtgaacaaccaatatatcaggttggatgtctcgaatgtttcgaatgtttcgagtgaatatgctgggtaagttgaattgaagaagcgctgatctgatgccgcgaggtggaacagccccgccgaactttgctctcagacgctttttattagcacattggttgaatacgaataacatcaacactaagttcttgacaataagacatgtagtagacaagcaatcttgaatttactcaattagaatgtacaattgtagacttgtcttggtcctatactagacgccctggcagatcaaacccactaacttcaatacgtacttgttaggagtcaacttttggagacaaagcacaagtaaacatatcaatttcttgaaaaaggattaccttgaagcagacaaaaggtgagcatcaatcaaatctcaaaaaaacatgacctatcagcataatgacactggtcatcacagatctagaagctaggtgttatgatatacaacctcggtcatttgttgtcaagtcaggatcaaggccaacatccataagtatcttaagcctacatcgatgtacatgcatatctagctgtgtatgaaatttaaatcgttgaaatattgactagatggtgttagttaaccatcaattatggctttcttcaagtcgtcctgggctgatacctgcaaaacccaagactctgtcatctgccatcactgagctttgaggaacccagccgaaacactcaagattgggaacttatgggtatatctcttttactatgataaggagctaatcttgcaattttgacttcgaagcacacaccgacgatgcattatgtcttttgccgttcccagtaacgccggtaacctattgctctcacacgcagatagctacacccaggaacatgtaacttgaaagtatacaaagaaaaggaatgccactaaggctgcacaacctgaatgttgtttttcttctgcaaagtgggagatcaaagttagtattccgtatcaagtttccagaatatggtttcaggcttagaaatagccatgaaacaggggatgcgattaccttccaggtatccagctcatcctgctttgatttgtactgcttgagcatgtcctcaatcacttgtctcaacccgtccgagttggtcttgagtgtaggaagcacatctttgacagtgcgctcaactaaaacgccattcaccaggcgaaaacatttgcggtctgcggcaagagggtcgagggtttcaatcacaagtctaaaaaaaaatagatgttagcattgtacatatccgttgagacatctctggttgtgctcgctcgtggtgaactccccgattcatatcagcgagaccatgctgggatagcgcataaccctggaagtaactcacttgtgttcttctgcttcctgctcaatatcaccgatcttttgcgctaattgctgaagggtatttttgaagttggtgtattggtgctgaagctctagattgagggggttcgcatcagctttcgtgaactcttgaggtctgcaggggcaatagaaaaaccataccttgctgcttcttagggtcaatctgtttctggctagacatgatggctgtttgatatggcgtggtcggcacaaggaagcttgagaaattgggatgacgatgcggggcggttactttttggtgttggtggaagccactactatggaactttatgcacctcacaccctacataggcactttagctcagaatctcatatatgtatgctcaaatacccaagacaactccaatatcattaacagaattcttggtttaactctatactaccaattatatgctcttcatgaactaagttatataccacgtgactaatattgcagtgcagtgacaagtcgatcagctcgactccaccgtcctctaaaaaaaggttgcctcgggtcagcaaagctgcaaataagctgtctcctcgagaatcagaagctaaacactgctaatgacattgccatttcagaagattgcctaggtgactaccagggcggtgactcttctctggcaataaagggcggtaagaagataggaaagagcttcgactccgcggatcactttctcaagtcaacctcacgcagaccacaccgagtcgtacattgcgaataactcaagtctgaaacctggctcaccagcccggctgaacgacatgtctcgcaacgagatgggccctccggccaaaaggcacaagggctttggacacctccctgcaggcctgcgcgacgcaaaacggaaggacattgacaattgggaaaccaatcgaatgcttacttctggtgtagcgcaacgacgagaccatgagggcgacttcatgcccgaagatgaagaagcgactcgcgtgcatttactcgtccacgatctcaggccgccttttctcgacggtcgtacgatcttcacgaagcaactggagccgatctccgctgttcgagatccgcaaagtgacatggcggtattcagtcggaaaggaagcagggtcgttaatgagcgccggcagcagcgagaacgacaaaagcaagcacaggaggcgacaaatatggccggcacagctctggggaacttcatgggcatcaaagaggacgaaggagacagcgctgtcgctgtgcccatcgaggatacctacaaaggaggaggaaacaaatttgccagacatatgaagaaagacggtggctctagcgctttcagcaatagcaagaccatgcgcgaacagagagagtatctgcccgcctttgccgtgcgagaggatcttatgagagtcattcgggataaccaagttgtggtggtcgttggagagaccggatctgggaaaaccacccagctaactcaatttctacacgaggatggctattctaagttcggtatgatcggatgcacgcagcctcgccgtgtagctgctatgagtgtcgctaagcgagtcagcgaggagatggacgtcgagctcggtggactcgtcggatacgctatccgtttcgaggattgtacgagtgacgacacgttgatcaaatgtgagtttcttctttccgctttggtgtgatcatatagctaatttatgtactagacatgacggatggtgtattgctgcgagagtctctcacccaaaaggatctcgacaaatactcatgtatcattatggacgaggcacacgaaagagccttgaacactgacgtcttgatgggtctccttaaaaaagtcctgacccgccgcagggatctgaaattgatcgtgacctcagcaacaatgaactctgaacgattttcgcgcttctttggcggtgccgcagaattcgtcattcccggcagaaccttccctgttgatcttcacttctcgcgcacaccctgtgaagattatgtcgatagtgcggtcaagcaggtcttggccattcatgtgtctcagggcgctggtgatattcttgtcttcatgactggccaagaagatatcgaggcaacctgcgagctggttgaagaaaggctgaagcagctgaatgatccgccgaaactcagcgttctacccatctacagtcaaatgccggccgagcaacaggcaaagatctttgagaaggccgccccgggcgtgcgcaaagtaattgtggctacaaatattgctgagacaagtctaacggtcgacggtatcatgttcgttgtggatgcaggttactcaaagctgaaagtgtacaacccgcgcatgggtatggactctctccaggtcaccccgatttcccaagccaatgcaaaccagcgatctggacgtgctgggcggactggaccgggcaaggcctatcgtctatatacggaaacagcctacaagaacgagctttacattcaaaccatccctgagattcagcgaaccagtcttgccaataccatactgttactgaaatcccttggtgtgaaggaccttttggacttcgacttcatggatcctcccccacaagagacaatctctacctctcttttcgagctctggtcgctgggtgctctggacaacctgggtgatcttacatctctaggacgtcgcatgacaccattccccatggatccccctcttgccaagctcataatcatggcctccgatgtatacgagtgcagcgaagaaatgttaaccatcgtcgcaatgctttcggttgcaaatgtcttttatcgtcccaaagaacgacaggaggaagccgattcagcccacgagaaattcttcgttccagaatccgatcacttgacccttctccacgtttatactcaatggaaaaccaacggtcactcagatgcctggtgcatcaagcactttttgcactccaaaacgctccgccgcgccaaggaagtccgagaccaacttcacgacataatgatccaacaaaaaatgcccctcgtcagctgcggtacagactgggacttgatccgcaagtgcatctgttcgggcttcttccatcaagccgcaaaactaaagggcattggcgagttcattaacctccgcaccagcgtgactatggcgctccatcccaccagtgccctttacggtatcggccaagtgcccgagtacgtcgtctaccacgagttaatcctgacgtccaaggaatacatgtccacagtgacagccgttgaccctcatgtaagttaccactcccccattcatgcctgcttgtcatctagtactcaactaactcgtttctctcagtggctcgccgaactcggtggcgtattctactccgttaaagaaaaaggctactcgcagcgcgaccgccgcgtgacagaaatcgagttcaacaagcgcatggaaatcgaagagcagatggcagctgaccgtgaacgtgctgctgccgagaaattgcgcgagcaggaacgcaacgacccagcccgccgcagaacggaaatcgaggttggcggaaagtccgtcgtgcgtaaagctatcatcaagccaggacgcagggtcggcggtttgactgcttcatcttcatcttcctcgcgacctggagccaatatcgatggcgctcatgatggaggtggaaatcgtcccggaagcagtgtggtcaagaggcctacggtgcctcggagaccaggacgtgcattctagtcttggtcttggagtgaaagtcacaatttctgtcccctaataccccgatagatgtgctgtgcttgaagatccgtacgcctcacgtccactctcttctttcctctgcctgaaatcctttaggattttccaaatatattgacctacggtcttacgtgttgatcttgaatcacatttacgaatatcttacgacgtggaacgatgcgactaagctagtttggattgtgctattatgacaatccagccagctaagttgctgctagtcagttctagcaataaaagaatagagacagttctctgatttttttgagtgtatactcatttccctatgtaatcctaagttatcacgtagtatctaatagagaagctcttagagcttgtattcagcttgcttttggagcttgcttctgcgaaatatacttctaggcaggatctttgtcgtcatcacttgtgatatacttactttctctaatactccctttatcgtttgcattataatataacaattagtctaatattcgtttcttcttttacatccatctacatggaatttgttcaatcgatacccgatattgagttatcattcagctcccttccgagtacgctctgctctttacacccagctttctccgaggtagggccatatgaatagcatacgcttatccaacaagtcagccttgtgtaagcagataggtcaaatatgaataaaattttccacttcgatcaaagaccagcgtgaagaaccagaacaaggatcggctaaaaaaggtgcaacatggaaggatatctaagagacgacattccccatcccatcgggggatcaaaacgaattaaacccagacaggaaacagaatgagccagcatggtacatattgaacagaggcttttagcaccgggcacaactcagttgataaagttgacacagaaaaagtgtaggatcaagcttccgaagatgtaatcggcgaaggccctggaattaaagatcagcatatgcatccatcgtggccttggaaaaacaatcgtgaagctggatcaccacaaaaaacacaaaagacaaaaaggaactcacctttcatgtgaaatacccgtcccctgttcttcactctcatctacaaagcgcgcattcttccccttagagctcggctttgatccagaaccagtaccgctgtcactagtttgcatgcgcagacttgccgtaaggacgaattgaccaacagcagcactaaagccactgaggaaggcattgaagggctatatgggagggaacagttgttagttattggtatataaatttccaattgcaaatcacatgccgtatagacaagacaagggaaaagagggtgaagaaaagcaatagaaacggaatggtatttgcacttacatagttcccagctacaacacagtacacaaactgcaatccaccaacaagaaccaggaatgccatgaaggcatctaggaggagtgtccgctgcggcgttgtagatgcatactgctgccagacatgggtagcaatttcagcggctgaggcattggtcttgagggttgttgggcctgaggagagcttcggtgttgtgagtgcgggtgtgggcgtgggcgtggaggatgccgcggaggtagttgaggccgcgtggcgcttgggagccatgattttgggattagacggatcggtagtacttggttatgtggagttgtcgttgaatagattatagatatcaccgatgaagattttactgcaaaattggtgcagggagggtgggttggaggacaatggcggagtggaaagtggtggttgatgccagcttggagcttgttatcaccgtagtcacgtggtggagtagatcccgatttggaagtatacaatcaagtgataacgaatagtctattttttcgatgatttaatggtaaattcattgactgaggtattgagattacgttttcgattaacggttgtgtaagatattggatgtacagtgttgccacaacacaacgtcgccgatataatgcgtaagagagaagaggaatataataacagtgaggggaggggatatcaataaccaacgccataaatcatcccatcattaatagaaaaggcctcaggtgagaaatgaactaccatatatcaagaggctaagcaaaccattcggcaacattaccgttggttggcagagaatcgtcattttcaacatccatctggaaatcacgcatgacttgatcccattcctcccagttgagctgagtggtgtcaggaaggggagcctcattcaagaatgggtttatcatggttgtgttgtagggaaggcttgtgggcaagctcggtgccgagatattattctgggccggtggagcatcgaatatatcgtttgaagtagctaggatgtttatgccagggaacatatttcgaagagcacccaatggtccattgctggggtcatagtctgtatcagatgctgttgagcctggccgatctatcgagggcgaatttggcatccctattggcatatgaatccgcggaagagtatgattatgattgatgctttgaataggctctgttgcggtggggaatggtccaaaactggatatcaattcttctttgtgcttggaccgggtggcagcagctcttttcatcaaggcggcgagcggccgccacagcatgcccttcttatgtgtggcctgcatggcccattccgtgtagatcgaactgacagcgctccaagctcgatcggtaatagggcaaattggtcgtacgcatacctcggacagaacaaatgcgattccatgccattgcatattggtccggaacagccagccccatttggcggtcttgagatcagtttcaagcaagtggccaaactcaaggacctcaattgcagtcagaaacaagctctctctcgttgcttgtgacacatttccacgctcttttcgggtcattgggtgatggacgatcagccataatttagcaaggatgagacgcccaactgtggcggtgcaccactgcaggggaatgttcatatcacagtgcttgatatatcgttgttcacatcgatcactgataatttgaatcatccgtccagcacgatctatgggcggtaaactgttaggtgaacgaaactgggctccggggcacacgtaatttgctctccgtaaagcgctcgttatctcacagcgaatgaggcagaatgtgacatccgtgaagccttctcgctccttggggggctcttccatgtcaggcgacaggtcgtcgtcattgagatttaatggcagtagagtatcgtacatgctctcgtgaatgagtgggtcggtcccatggtcttcagatgagcggacatccaatagtgaaatatgccaccataatcggcgccgcatctctgtttcatacggtttcagagcgaaattgctgccatctcggtgtaagcctaagctctgagcaaggcgtaatacaatcgatgtcatagaccacacaaatttgctatcatcttctcgtcgcacacagactaagaataagacagccgcttgcagaaggaccaagctttgtgtattcaagaacccggcttttgcaagcgcttgctctgtagcaaacctgtaccgcttgacagcaatagttcggtcttccccgaactggaaccaacagtcatcgggcttcatgctgacaatgctacaaaggtacatggaaaataccaatgcctctgaatttttgtccaaggcatcagggttccgtgctgcttgggaaaacaggtctctggcagtcggtcggtgtacgatggtgactaaaggagccacattttcctggtatgtttcccaaagtaaggagaccttgggcattggggggtgaaactctcgaagagactttgaaagcgagtagaatccaaaaaggaaaccgtcatgggaggccgactgagaagactctggtgaaggtgtatcatcttcccccgaggacgaatgatcaaggatatcctgcagctcctctatctaaaacatgttaatatgaagtacgtcgaggtagcaaaagaagatgagcgatatctacctcgtccccaagactagtccagagccgattgctgacatatcggctccggccttcatcaatgactaaccgcccaaattcattctcaaacttattgggagcgagtttcttcggatccgaagcttcgaacggacagtgacgtccgccgtcaacctggttttgtggctcagtcgaaacagacgtgggcgcagtcggctcgctccgaacggtcgaagatccagtcgtagaaggcggcgcctgagtcgaggtcgatccaccctctgtatcaccattgcccctaagatgatcaataacaccctccaaacgacgtaaccgcgaaagcaactccgcatccggtggacgtttcgatttccgcggggcacggccaggagggggaaaggtgcagtcgatgccggctttggtacagttcgaacacggggatcgcttgttgcagcggactttcctgcgacggcaggtcacacagctgcgagaggtcgagctcgggggttccgtagccgcatggcggggaaaggtggcggccaagttcggaggtagtggagtatttgaagaattataattgacgggaaagggattcaactcctctggggaagctggagggaatgacatcgcgctaaggtaaggactccagtctcgcttcccacattctttgaagtctagtggttctagcaagaaataactagcaaaaatacgaagattgtacggagtgatctcataggcatcaaattatcgcttagggccctggacgcatgtgactgattagagttccaaaggctatgactcagcgcccggtctggccccgtcccgttgaggccaaaggccgttatctccgtttgactccggactccggagatcgtatagatcgtgataagccttgagaataaatacatgcttagatagtggtatatgtacagcttctatcatcagatccaattcaaatataccgacgccagatatatgcaagaaatcaccacgcatactgaccgtcacgctgaaggtgagataaataagcacttatgcaagcaatgcgatcggtggtccgctcatgcttcgtctatgtgcgcaggagtgagtgtaggggtgttcatgggtaagttgttaccgcgtgagcctcgtcgaagcgagcgcttgaatttacgcctgtagagcatcagtcaaccatcgttagatatgatagttataaaactcacaccgcggactcccaaatcttggtctgttcattgaagatgtgactaggacagttagttacccaaactaacatccatagaatggaacaattcaggactcacccataaaagctcgttcgtgtaagtgcctttgggccatactcttcttcgaggagatatgtataagcgtatggaattttgaccggaacaccctcgaagagactgtcgcgcagcgggaagatgtcgctctcctatattacccgttagcgagactagacagacagcactaccagacaacttacctcatagtgatgtttatccttgcacattagcgcttccggatggccattcagccgcttagcctcatccttgcggacagcagtgatatcgatgaaaagaccagacgacatgtcaatccagcgggcatcaatcttattcaaagtgtctctctcggatttgacgacataatgaggattgatctcgagcatgtacgtacggccgccgtcgacgttaggaagatcgaaatgatgctctgtcatgttatagtaatccgccaagaaatgaatcgtcgcctccgagatctgcacatctagatcgtcgtcccatggaaacacctatacaactggttagggagtcaccttataattcgggatatccataatcccaccttctggttccaccaccaggccaagagagtcccatgcatgatccatgtctctgcaccgattgcgttcattgttgtgaaatatgtttggattagatccgagagatatgggatgacttttgtatctgggagactgccattggcgtatctgaaaagcgttaggcatcgcggttgggattgaaggatgagcgagcgtaccggccgtcataatgatgattgaatctgagtactgcggtttagttttgatcatatctggtacaattcccaggaagggagatgttcgacatactctgattcatctgtagggttcacgcgagtcagtaaagattcaaatcagagttccatggttcgtggccttataaaccaagcttggggttgtacacatcgacgaaaggattaaggattgcacttacgaaagtacttttctttcggtatcgcacgttcactcttatactcctttgttacattctttcgcacgctcatgaaattcggttctgtatctccgcagactccagaaatggtagtcgccaaaaggaatccatagagccacaagactctggtgactgcagagcgcattccgtactggagtttcatagaccccgacacttcatgctccggatctcaatatgtacaatgagcctagagattgtgcgacgacaggttcgacctgtgctgtccacagggagtctcttccaaaatgggtgacgtccgaggatcggagacgggataatttatggagaacaaagataacaaatagaaaagagggtataatagtgtatgaagattgaagaactggagaagggactggagaatcaaaaacgcaggagatattttgactagtagccagttaatcccatttcagcttgaatttccgccggtttttccggaacccccttatccaagagctgacgactcccatagaggaacaacccaagcgacatatccacggatcgaatcagcagagtctgcaattttgcgccacggacgtgccccacatggcaataagcttgtcttgagggtcgcgtgggcaatcttggcaaggttttgcgtgtgaaacacgaatttcaacccgatgtttcccatgggtgacgaggacgcgcatcccgctaacgctatgtccattggcgttccccaaaagaggtagcttggctgctagtagcataaagtggcgcccagaaactgattggggcatacgcgtcctcccctatcgcatcattttagtctagtggctgcccggtccgcacacttagagacgggttgagaattggtggatataaggttggacatgtatcgctctcgaataagaaatcaccttcatcggttacttcggctgagattcggttagaggtgcatctcaaagatacaggctctgccaagggcttcgggtaactcgatccgatcgaagccccactcgtccccagcaatgatctctgatgttgctgttatgggctgcagcaacgcaaaaggacccaagatctgaattgcgtaaatagaggataaagagcagatcctccccagactcgactgatcaacggcagtgagcgatcgtggctcatttcgaaacgtcattgaagctgaccaatcatgaaagaatgcccgatggcgcatgaagatagccattgtgcataacactgattgcagaaatctccgaccccgagcctcaactccgagcggtggatctttcagcttgagtccatagcagaaagatattaaaaagcgactttgcccaagctggaaagttgctctttcgattttcttcaagttctagtcttgcttcctgatgtcgactatgagtggaccgggtttattttccagccgagccaccatgcgaccgggaaggatttgaaccggtcctttccacgaaggagatcatatctgctggtacggagtagtggagtgcgagctgaatggctcgaagtaatgggagtgtctagggcataccgcgtacctccaatcgtcacttggattgaccttgaaagtggtggaagatgcgagctggccacaaagcagggcctaaagatgttcggtgtccgtctattccgcaaaccacggacatcgccgttagacaatctcacgcgctaaaatgcttgtcaagacggcataatcggacctgagagatcaacaaacagaataaccgcataaatttcctcaatgaaccagcgttgatatacttaccttcaactcaccctataaattagcgcgtgtcgaacaacacctacctcttttactcggatgttccatagggcacacttgtgcacacttgtccggcataccgagaaaatcaggtttcaacggagatgagccgagtcttcttatcacatgcttatagttgtcctctaccaccgacgccgccaacgccggtagctcatccacttggtttgtggcagtgtcgagtggcctcattgtggggtggacaacaactgagacatgcatgcagatatacagatgcatatggttgaatggctatttcatactccgtactcttcgcgaataggatctatatcccgatgatactataacaccctgttcggcgtacggagtacatagccacacgttatttcacaggttcggccggggtattcgggccggacatacatacatgttatgtcccatgttatgtcccaaggtttgaattcatatttatttccctcatccccacaaatatgaagctatggcgagagtaaaagatgcatgaaccgattagggcaaccaggcactttcgattggccaataatggacttccgattttcggtggaggtgtacagaggagcgagtggaataatgattcgctatgtttagctttagcctttcaatctccattcacggtttcgtttacaagtcgagttaactagtactacggagtatgttgtacactgaactcagccaccgtaaaagaatgtagatcacacatacacggattttaggccgagcgagatggatttccctttccgttttagtgctcaccccttgccgctttttgctcattgagtaaagctgagcacgcccctgagtattacgtaatcgttaaacccgctcactgagcatcacatgattattacataagctacaaagtacattttcattaaagcattgaaactaacttatgaagataggagtgcctcgttgtgaggtaacagggaagggaatgtggacctgcggataccctttgctttttgctttaatcgggagttggggaaacaagcagaaccatctgatatgggttggcacgtgaggaagttcacgatggctattgaaggaagaaagaaaaaaaaaagtattttagtctttctgctggacggaaggaggttggtagtatcatcgtcgtgggcattggccccgacagatttcggtctgtcaactagcaacgttactttgtacatccccgagaatgaagacatcagaagcattaatcaagcatgtgcatcattataaactcatcccggtaaaagtattcatagaacatggagcgtgattggcgttgtcataatattcattatacccttacattgctttatgcgggttactcacatatcagtccatcactcgtcttctctggctagcaaatgaggcggtgaatagaattacccttaggaatcctccaacttggaccagaagggtagtctatcttggtccctatattataggtattcccagttagaaacttttctactaatctcagaatacccaaaaggctagttctaccaggcctatctagcgtcgacttatgcctccacctggaaggcaaatgcacagtggggccacattattggctttactattctgcgcctatgccactattcaacctcgccgagctctacatagttgcggaatatatccaaccctccatttttggttctacaatatctaggaatatctcagcctagccctttcggtaatcaggttagtcagctgtgttctaggatcgtattcgatataattgagcattattttccggtgtaaggtatttacagggtttttaaatccaacctgcacagccaccgctttgagacagataagccacaatacttggaacacctgtaatttccgagttacataaaacaggtacgatcatgtaacgtaattcacatacgagccaccacatacgacccgccaccccattcaacaatctagtttttaaatacatttatcttaaccataacgccattaaattaattaaactaaattcaactatctttctggatacctgttaattttatgcccggttcttccacacccactataccttgctgcagcccgtggacgtggttctaaccctaattaagggcttccgcgcggggggtatagaggtgcttctgatgcttctactaccttagtaatcaattaagaagcttcttgaactgagaggccttcttcagcgggtatctgccttctagatcaggtctatttttacttcttcttctcattttcatcctataagttgtactgtagtaggttttgcggaggatagagcaggtatttgtagaggtagaaggtataggacgaagaacattcgatatagacggtttttcttgtaatgacttttggctatcttaaggagggttgtagactaagctgtagcagcggtacgttatacggtttgacatgccccaggacggaggaggtagcgctttaccaaaaataaaaaacttgatgaaagctccgatcagaagtactactaagagctggccgaggagaagcccttgtgtaaaggacaagctaagagggtgttagcaagatcacatagtccactccacagacagagggcgtacgaggattgaggcgcgagtggcgcgggctcatctgcattatagttagcataccagttcgagcccttggagatagcatcactcactattttggagcgccattgtcagcggctgtcgacaatccttgttcacagtaccatctccaagtggagaagatgttccaactttcggatctctagggctagcttggccgaacggcatatctcttatcgctgatatgccactcttgaccgcctgcctctgaaactttaaggaagtgcccttatctatttcgggactagcgtcgcttgcatctataaaatatgatgaatgcctgccactcgtttcgttttagctcacctcttgccgatttttgatctcagagttaaattgagcccctggattgcccagccctggaggctcaagggttagttaactagttactgatgtgcgctgggatgacgtaatcttacgagttaagctgcggttggggtccccaaggtacggtacatactgaagatgggccccctgaggggcaccgacagccctgcctgcgaaacaggtgtgagagcagagtcgtcactgggagtagtagggtgctagagaggagaacaccatggggtgactactgagaagagaggtggaaaggtgtctgcgttgctatctagtcagttaggcctcgggagtgcttttatgtcacatagccgcttagtcatcctgctctggaaactcccactgcaatacgtacatatatgtacatgtatagcaaccctccaccaatcttcttctttcccttccctctccaaagcactatcatcatcattcactttccttaatcctcgccctgtcgagatcttcattgacataatgcgcaacacctggccgtcccctatggtccgcaaattcattcgcgccaacgcctcggcagacccgccaaggccgtcgttgttgccctcatctgacaagtctgccgagaattcctggcctcaagaccctatccgagacgaatattgtttcttctacgggacattaatggacccaaatatattatccaaagtcttaggatcgtcaaaaccaccacctatgatgcgccctgctaggattattggttacgaaatcaaactttggggcacataccctgctctcctcgatgataaaccacttcatccagtcgatggaatagtgtgtggcctcttatcgccgacgcaacttgatcgacttgccgcctacgaaacggataaatatcatcttcaagcttgcttgattaacgttctgaataatgacggtagcaccgagaaaaccattgagggagtttctttcatgtggaatggtcgagaggatgagcttcgggagggtacttttgatctaaagcaatgggggaaggacagacagctacgtgaattggactaagaactacagaaatgtccaggttggttattcgatgctttaactacgtaagtactaggcttacttacacaagtaggatgtttacttaagaattgggaatttgctttaagacgttttgcttcagaaaatgttgctttgagacctggtgctaagctacatactacgtagtttctttataacaatattctttcggtcaccttcactctctttcaccttaagcatcttttgctctgacactgtcaattctcgcataggtcttggctcaatagctcctgatttcctatggaacagtgaatctaagattccacagttgacaccagatagttcaaagctggttaaaaacttctttaacccttggacatctcgagaaaaacgtgggaacgtggtgtctgacgctgaaattttggacgaatggataaaggatgccacaaactctacccatggtaaacaggatttctcgtcgttcgaagctggtgcttgacgaaactcaattgtagtttttcctccgtaatacaaattggtcaggttccaagcgaagtatcttctgccgccgtcgttcaaaagatctgcaatttcgacatgatttgtgcatcgctcgattagagccaagcaacgacggaaggtttttcctttcaggcgagaattgtcgcagtagttactcgctgcgtaacgattgtagcgtcggtggtctgggacaatggaaaggatggctggttcgaagtagaaaatatgacgggaactggatttcagggttctgagactccatggattcccctgaggtggagaaatgtggacgtgaacagcacatgttgggttcgtagagatcttgcacactaaattgagagctctaaacatgtgtcgcagctgatctctccaggggctttgcgcttggtaaaaaaggattggagtaacaagttccgctggctctgatctgtgttagtgttttgaaagtatgcatgggaattaagacctacattgctcagaattgccgattattgtcacatcatcagtcaaagaccactcagtggagtcttctagcccatcatataagccgtcaatgtcgttgtggattcgaggatgcggtttccttgaggcatggaaatgttgaacgagatagtcggcaaatgactccaagtctgtgaattcagacttcgctttggtacgatgttggagaagtagctcgagttcaattccgatccgcatcccagcctccatgtttggcgtggaaggtgtgagggtaggctttgattcgtgtctgctgtttgtagatagataaaaactccagtgacagatgagtgactttggtgatgcatgtggctcaaaggaagagtgaaagcagaaggaatagggagatatagggcagagtagagccagcattcgtgcaccttcctgatttatcacactcaacagacagcccgctctaccttcctgccaaacatgtgcatgaaaagcctcaagtgcctaatgatctttttatagctttggtacattcttatagcccaggtccagccaaccttgaatcgtccgactcaattcatcgatttcggcttcggtcacggtagtacatccttttggtcttgggtattcttttatctttctctcggatggaatctttatctgtatgagtgctaaaatcatagctgctctcttatagatgtttgtaacccttctctttggcaatcttatcttgttaagtaaagaagttttttctacctatagctaaatagattctaacagaaatccgtctgtattgatgtgtatggtacaactggacgatgttgagaactctaacgccgaaacgtcaaaagaaaggacggaaatcccgtcctccatcaaccccaacaaacaaatccacaacccgattgtaccgcagtcggtccccacattacagcgagcttcaccacccgaggcaagtcgctacgtttgaataatagtatcattgtcgctaattagactagggccaagcgaattatactctatcggggcttataagtgacgactcggtcgcaataatgcgacaagcattatcaccagacccggttgtatttaacgacagccaccaagcatgggcaaatagtgagggaacgacccttctagaaacactcaagactctgtcacaggcagtcaaagatctccagaaaagggccgatacccaggggcaggatatccaagacacaaataagagccttaaggacacacaaaaacaacccgaggatacacaaaagaccctcgaagaggcacaaaataccctcgagaatacacaaatagacctcgaagaggcacaaaaaggcctcatcaaatatgagcggacgtttgacgcacatacaattgagtacaattgaggtgcaatcaacaaaaaggacggtcagtgcttaaaggtttttaattgctgggcgctagcatgcacagaatagatggctgatgaatgatccacctatcacgtgatttgatctgatcttttcatgcctttattttcaggccgtcaagatgagcatgtctgtgcgctgactgagcaaacccgagcactcactgagcactcgctgagcgtaccctgagcactcactgagcaatatttgggaagtactaaacaattttttttacattactaagcataccctaagtgctcacagtgatcacctgtactgtgaaatactcagtgagcaggaacctgagcgcccttataaaagcggcggcaccccgatcgggaaattcgcgaccgtggcctaaaatccggtacatacaggtaaatatggcggagtacggggttttcccgatggggtgccgctgctttattagggtcctcaggtccaattcaccgattattaccggtacaccgcacaacggaggcaaacgaaagatatagaaatcatgtatctttgtaaatttgcatggctaatacatataagatataaccataacatattttctcaactttcgaaccatggagtaataatacgtacagtataagtctaggttgaattaacactaggattaatcatggctgcacgattcagctaccaagataggaaataatgatgctcaaaatgcctcacaaatcaataagcccagaaacttgttatctacgagtttgtcaaaaccattcaattagggttgagatattccgccacgatttcaatggtgggccggaatcgtaatcccgataaacgtccatggaggccttcgagagtcaataatatacgagacgtgctcagttttactctggcgaccaaaaagcggcaaggacagccctaaaggagaagggacagccatctatacctgtatggatgtaagattaccggaatataccacctgggatgtattttatcttctatcccaacctgaactgggctgaacctgacgcttagcgtggagaaggggatttttaccctctccacttctccagggcttctagcctttccctgagcgcttgagcatctttttgctttaagcttcgatttattttctagctttcacatgataatttcttgaatctcttattcacatccttgtggggtctgacatcgaaatctatcggatacttttctgtcagttcgactttcatgtcagtccccattgcacgaacttcactcgatacaatgcctcgatatacacagtaaacagcattattcggacgtaccattgacgccggctcataatttatgggaaagaaccaaactctcggcgcgcgcgcctgtgtgaatatgtcagagacctcctccacatcccaaggcgaatcaagcaccctccaaggatcagccgcccagccgttaaatagatcctgcgagtcttgccggagtctcaaggtccgctgcctccccagcccaaccacgtctaaccaatgccagcgatgcgccaagggcaagcgatcctgcgtcttcgtggcgccgcagagacggcggccccggaagcggacggattcgcgcgttgcacagctcgagaaggagatgcggatgatgcgttcgctgttgaaaaatcgcatccccgaggaagaggaaccggattccagtgacgacagcgacggggacgatgttcaggatgaatcggccgatacggacgctaagagcactctcgcattgcgggacaattcgactcactcgtccgaggatgtccgttatatggattgttcccctgaattgctaaataccccgcactccggcgtgcatggtagtggcggcttttcagcgcccccgattttcacggatatgccggctcgccatgaatcgctgcaggagaggcttcctccggcggacgacgtgatcgatcggggaattctctccctcgaagatgcggagcaattggtggcgtatttcattcacgaacttgcatttttctttccattggtcgtcttgccttcgaacaccacggcagctcaactgcgacaaacaaagccagtcctctttctctccgtgattgctgcgacatccatatccgtcgacgcaggattggcaaccgtgttgaaccgtgagatggttcgcctctattctgagaggttcttcatcgagggcgaaaaatcacttgagctagtgcaagcgctgctgctgatgatcatacattatttcccgcccgcctcgcctttgaagctgcagatttatcagtacacgcacatcgcctcgacgatggcgttagaaattgggttagctaataaacgtcgtgtctcgaaaaagtccgatcgcaaaagcagcaagcatgacgagctgctagctgagcaggcgaggacagttctcggctgctaccatctcggttcaagcgttgcgatgaaaacccgtcgcccaaatatgctccagttcaacgactggatgacagagtctctcaaacacctagaaaactcgccgcatcgaacagatcaacatgtagcgacatggttcgagctccaacgaataaccgacgaagcaatgtcctcattcggtctagacgacaccagtaccacatcacccttaaccgagtcgcgggtccaagccgtgctacgctggttcgacaagcggctcgagacgtggaagaagaacattccaccagatatgctgaccggtaagaaaccccagtcctctcgctgtgtcatgatgcatccaaaatcaatgctaacgaatcccatcaaaccagtccccatgatcctcgaataccgctacacagcactagcaatgtacgaactgggcgtaggagaaggctaccgcgacccagacgccataaagcgacgatatttcacgctgccgaccctcgatggagagaacaacagtggcagcgaagcaccggacgccccactcagcgcaatccgcatcgacatcaaggtgaaatggatgaacgccgcacatgagttgctagacgccgtgctggtttgcagcacggacactttgcgtaaactcccgaatctcacatacactcggttcgcgatggccgtgacatccctgctgaaaatacacttctccgtgcgaaccggtgctctcggggaagtcgtcacggcacaggccgtgaatgtggctttctatctcgatgccttagccagaaagctaagcgaggccagtgccgggggcaaataccttatccccagtcggtggtatcatgtcgtgggtgttaagggccaggattggtatgaccggctggagaggcgccaaaatggagggatagtagctggttctcaagtcgtatcggaaagcccgccgatcggcaccacaaaatcgatcccagcatcacaccctacccaaaaccaaaaccaagtgcaagtgcaagacacacatttggatcaggtcccagcaacgatggactccttccccggcgtacccatgcccccaatgccgccggcgatagacgggtacgtagcgatgggcggtgcgggcatgtgggccatggacggcgggaataacccgaatttctacgccatgagcgcggcgggctatcagccctcggtgacgcatgcgcaggcgatgttgccacctcagtttgcctacgagccgcagaggatgccggttagtgctgctgggcagcatatggctagggcgggcatggagttggatgggtggcttcctgatgggagtatctttgggatgcagcctttgcctgaattttgagatggagataagagcctgggattaataaatcccggggtggatgcacatgaaagtgagtctacaacatatataatgtcatatatcataggtatgaactgtatatacatatcagcttgttaatattttaaccccgatatcccgtagtcatatcagcaagggtaaagggttatgttatacttaccagcacattgagaacatcatccaagagattcccaaaaagctagagcctagctcccaataactcaaccctggtagatgggagtatcacttcaaaggcagacatacccatcaccacacacagtcaagtcaccaagacgagaagaaaagaaaaagaaaaagagaagaaaccatcaaagagcgagtaccccaacggacattaatcgcatttaaagcgaaacaaataatacattcgcaaagtgctgtcggaggctcgggaggatcggaacttccgtggaaccgtcggggttcattgacgtgttggatatgggtctgatgtgggtttattcggggtcttggctgttcctttctgcactacggggtatgttgtatgtccctatgttgcattggtagtttttgatagcattggcctgtgtcttgtactccttgtatccgaccttccagataggtcttggattaatttgtgaatgtatcgttgttattgtatttcgatgtgactatttgaaggattttaacttcgttactcgaaattgagttgtataacacattcgtggatcgggatctatggaggatccgattccatggataatcagacagtaaccacatgcaaaaatgcacaggcagatcagtaatcatagtttatgtaaataatctcaatcaaaacaggttcgtgaattcattgcgtagatagaacatggatatcaaagccaaccgaaacaaagaccaactacctgatatattcaactcctggcctggcagtacagaataaaagaaaagcgtaaaagtaaagcaacagaatcatagaattgaaaacgcttccaacgcatccataaacccagcaatagccccaatccccaccaatccccttgtagcatttcgagtcaacgccttacgacgatccttggcatcttcacgcggggatcggcgtgggtgcgtcgacggggacctttgatctgagcgagtcggcgaggatcggaagctagactcgggggacgaggaggaaagcgggtatgtggatggatggtggcggggttggagtttgttgttgttgggaatattgttgtatgcctggtttcgagtcttggggggctcgaagtagacttggcttggcgatgtgcctctgggagaggggttggaattgggaatgttgatggctgggtttgattggttcacgtttgttgggatggatcgggggattgcagcgtagtcttggttttggtagtatttgtatggctgctgggggggacccggctgtgtgtgtgaaggtaatggtggaggtcggggtagagcatggttcgggggtgggaaactgccgcttgggtatgcggggggtctactgtcgggattgttatgactcggatatctggatgagacgctgttggaatggaaactgcggccttgcatagggttggtgctgtgtgagggtcgaagagtgtcgggtctctgctcgccttcgtcacttgagtcgatgactctcgagtcgctgcgggggctggatcgacgcttgagatattcgtccggctctggttcgctttccacttgagcttggtagctggagtactttcggcgtagctctgctgcatgatgtcgggcctcttgtgaatgggggtctctccagtccactgttgctccttcgaggtagtaacctcggatgctgtgattatcaaagcccggctcttcggtatcatcttcttcggcatccgaagagacgtagactcgaggttgaactcggttgttggatgtattaaagcccttggcggcatggtgtagttttgaagggtcaatcgaaggcacccagagtgaaagcagccggttcaacgtgctctcagatagtcgcaccatatctttcggggatctttccatatcactcagttccacgtcactattccccaaagcgatgatgggcagtcttgttggatccgagtgtctggttgcggcagcaaatggcttcgatatcgatgtcgtattggacgagtaattgaaactgattttctggtttgtcgggttcttggcagcatctaaagtctcctgttccacgagatcccacaagcgatcaaggcgtttgacagaccaatatcggacgatgatcatgttctgagattcagctttctcctgagcaatggcatcgttggtagtggctgtaaaggaattagtagcaattccgtcgtcaatactggatttcaaaacgtccccaagctctagagtctgtagcatcacaatcagactgagcttgagagtttccaactgggctagcaaataggtgacatgctgtttccggaaacaccatttgagtctatcctgcagtgggattctcataagatcattgtctctatcggttgccttcagtttgtccagcatgtgttcgatttcgatgaatatcatctggccttgtccggagatctcccatgccttctctgtcgcctcgggagaccgttccgtatcagtgccctcaatgatctgcccgacatttttgagcaccagagcgaaaagcgagattcccttggcgatactatgaatctccagtctagactgagcgagttgacaagcggcagcattgaggagcagtgagaggcgaaaacccgcaccggcaaccttgataatggaagcctgtgagcctttagagagaaggaactcattagtagaatttctcaactttcaaagggaaagacatacctggtgccatgataaagcagtgtttcagatcatatcaaagacaaagtggacttcctccaactatcataacctccaagctgttccccgccaagaactagagccgcaactgcatatcaagtgactcacgtctgacatatcaatttggaaccccggagggttctctgtctgtacgcccgcgattagtggcgtcatggtctatgatttctcgccttctcgttggtttacgaggaccggcggagttgatcttcaacccgaaatgatctagcgcatgcttttcattgttacatgaagtcccgggcaaaagtaaccggcactgcctcaaacctcgattgccttggatttgtttatcaagactgttttgcccgtatcaaaagggcagattatgccccggggatttcagatgcccctacccttgctctttacccggggtttttcccagggcgaagcatggtggcaatgacctcgtattacgagaagtgggaatcttgaatgaatggtaagctgattactccgtgaagaatttcgttatctccgagttaagggatctctcttgccttgtataacaaaatataataaaacagctacaaacacagccctggggtatatatatgtgtggagaagacatgcagctattccgaggtggatctactaacattgacctattaatgtgaaacgctcctatagaatgaagaatactccatagagaaacatcaatattcaaaacaatcaaacaagaatgtatgtttttcgaagatctactgttttcattcagacttgtttatttagcatcggacccgatgggcgcatttccgctttcggtccctccacagttccttttgcgatttgcctaatctctccccagacatccaaacctccaactctctactataactctttaagctctttaattacagacttgattcaatcctttgttgtggctgctctctgctagctaattgatctctccgccgcattctccgcccctcctttttccgccgcgtggcacaccgtcatctgcggagactattgcccaagcctgtccgatgacaatctagtggcccaccatcggacgtgggaaactcgtgataaaacaaatacgcccaaataagagccccaaagctcaacgcaacaatcgtgaggccggatgggtgagctcccgaaggtatcgcgaaggaacgagggacaactgggatccgatacaccaccttaaggcccccaagagcctccagtccatgaaaccatgaccgcagcctcgggtgtcactgtagacacctccgattatcctatattatccccgccgaacgccctccattcgtcccagcacgagccccaatcgacaaagggcggttcccccacaaatcagaatggaaaagagacagagcgctcagcgccacaaccagtagcacccaaacccgctgcaggatctgttaaacaagatcctattgcatcagatgaagtagatgattttggccttcccatccgagcacgccggcacaaccccgcacccagcgaaggagagaatgccagccaaaatatccagaatgtacctgtgagctcgacgggctacagtgacgctgtggaaaagggaaaggagccagagttatcacagggcaagctagccaattcgaataatacagaagagcgaggccagggcgcagaccataacacttcttctacactcccctcgtattcatcggcctctacagctcttgctcagcctcggacctcagcttcgaaacaaaggtcaccccaggtgtcggaatggtcgcaccagcgcctcgcccaacctgatgcacattaccccgagagcgaggagtcagagccagagcccgatgagtggaaagcgatgcctgcgcttggagagttcgactattatgacgactatgggagactcattgctcgtggcgccaaagaagaatccgacgaggctgtataccaaggattgggaggagcagggaggggctatactcgggtgcagctcgacgatgatgcccagtctgctacaagtctagatgatgatacaagctacctctttcgagaggcaggcggcaactctgctggtctagttggcgaggaactgcgagataccatcagccagctccaggccaccaaagaccttctcaacgagactcaaaagatcgcgtatgtgggcgttgtcaggttgacaatccattatatgaatcatgatctggcgtcaattgccacaaccaaatctacgcgcagaaccatgcagaaagcctcggatgccatgcgaaaatggggccaggcgatcatggggcgagtctatgctcatatggatatcaattccgctgagcagattatgattgagcagctcgcggagcatggggtggaaccagaagatctggtgcgaccactcatgcagaatgcgcgggtcaagaatcctatggcagagagtgagccgaaaacctctacatccagtcgaaaattcgattctccatctaggctctccgcagagacggactcatctgaactagatccacctccgccatacgaggtccacgagactgaggagctccctgaggtcaagacgccttctgagatgccaacctctgaacgcatagatatcgatctccgctggactgtcctctgcgacctgttccttgtgctcatcgcaaattcagcatacgacgctcggtcgcgcactcttttggaaagggtcggcgcagctttgagtgtaacatggctacagatctcacggttcgaaaagcgagtcacagactcccttgaaatgcaagaacaggaagagaaagagaattgggatgagtcagatcacatggaaaagcgtcgcaagatggccttgaagcggaaatatatgattatgggtttagcaacggtcggcggcggactcgtcatcggcctttccgctgggttgttggcacccgttatcggagctggtcttgctgctgggtttactacagtgggtatcactggaactagtgcattcctgggaggagcaggcggtacagctttgatcgcttctggtgctactataggtggaagcaccattggaatgagagcttcgcaacgacgtatgggtgcagttcaaacgttcgaatatcgacctcttcataataacaagaaggtcaacctgattgtgacggtctctggctggatgactggcaaggtcgacgatgttcgtctacctttcagtactgtcgatccgattatgggcgatatctattctgttctatgggagcctgagatgcttcgaagcatgggtgacactatcaatattctggcaacagaggtaagcttctagagatgtgcgctaattgttaatagactaaccaattccctaggcattaacacaaggtctgcaacaagtactaggcagcactgtcctgatggcgctgatggcatccttgcaactaccacttgtcctcactaaactcgcatacttgattgacaatccctggatcgtttcgttggcacgcgccaattcagccggcctcgttatggcggattccttgcgagagcggaatcttggcaaccggcctatcacattgcttggtttctcccttggtgcgcgtgtgatcttctcttgtttgaaagagctggccgaaaagggtgcccacggtctaattcagaatgtatacctatttggctcgcccgttgtggcgaacaaggacgaatacctcaaggctcggagtgtggtatctggccgatttgtgaacggctatgccacgaatgattggatcctgggctaccttttccgggcaacaagtggtggcatcatgaaagttgccggcctcgcagctgtcgaaggtataccgggcattgagaactttgatatcacctcacttgtgaatggccacatggattaccgtacggccatgcctcggattctgagggaagttggttgggaggttcttgaggatgagtttgcagaaatcgaggatccagacccagataaccacgccgaacgacagcgcgaattgattcgcgagattgatgaagctcgccgagaagcagaggcgaagccagagaagaagcgcttcggcctgttcaagcgaggcaagatggccgaaaagaagaaatgggaaacgtatgatgtcgacaaaaataccgctcctcgcgagtcaagcgatcccgaaagtagccccggcactgtcctcttcgatattgaggccattcgagccgagttgctctccgaggcgatcgaagtcaaagaattagagtcgactatgcctctgatgaagctagacctgaacgctccgtcaaaaccgtcacccgcgcagccctcttcccctatcgacaggaggcccaagacacccgaactcccagctgttactcgcacttcttcactacccccgcaagcctcggggcagtattctccttacgggcccaatgaattctctcccgcgccgatgcacgaagatatggaaatgaccttcgacacatccttctatgaatccccacgatttagaaacgacgaccttcactctcgtccggagttgagaactgcctctacaatgccgacggttggagccagtgccatcggagctatggccatggagcccaatgcctgggcggaccatgatcagggacatcgggatggcgagatctcaatgacgttcgaatagtgtcggctctgggatccttctcatcttgctttccctttctctctttatacttttctttcccggtcttaagcagtagaaacaggtcaaaggtctagatattttgtatctggtctaattactgacccttgactgtggcttgcgagttccattcgtccccatacccgaagtctgtgatacaattccatctcaaacctttcacaaccgtacgggcttcgttacattgcgctagcatgtcctcgcctggcgaagaatccgatttcaatgttttctcctgcacccctcatgttcgcaagaacacactggcatgctcttgaagacggtagtcgggaactctgttctggtcatttccgtttcgacaaagaggatcaagatgctttccatctatattatgcatgtcatctgagagtaattgtgtaaccattctgtatataactgaattagtaactgtctcacgtggaattcgagtctcgcgtttcccctcatatggcgctgagtacggcgggcgataacggcatattggacaactatgcagcggacatttgattggctcggaatattgactacttcaccgcctttctcaccgccgctctcttgatgtgccgttcgatttctggggcttttttacaacataggccagaagtcctttgagggtctctttcttatgagtttttctttccttcttgatgttaactacgggtagctggaagaatgattatcagaagctctctacggtcaatagtgaattatcacagactttgggactaagacggaacggataacggtgacaattatacatacctttcaatatataacatgcaattagggaatgtttggagtattacggagtacaataaatagacctaactagtgaactacttcatattctataaatgttgttacacgcaatggttttctgccagataaaaccccgacctacgcgatgattcaaccaatcaaatccccgttgtccgatacgccgctatcgcccaccgtggccaggtgtccgcattgtctcagtttctcgaaaccgagcgttctttgtttcgaaggcccaaaaagaaatccaacaccgaatcaacactgtacctcgaacttaaccgcagacatctttgcgaagagacttgaaatcacgcaacaacgcgccctgttccaagcccgaattccctcccccggcctgcgcaacgcgcttcacatgaacccggactagttctctttgactccaagctttcagacccccgattgatgccgacaattggcgattgaaatcttccgccaccctctatcatggccgcttgggccaaacctgattccagccatgcgtccaatcgtatgacgagggacaatcctccgcgcgagcatcttttgtctactttcaataaacccaagtctgaagacgcgattctcgacgtcgcgacaatcaatggggaggctgttcaacctgtcgagacaaagccggagattaatacagacgcggagcctttaagctccgacgaagaggacgtcggagacctcattgctggacctagcattgagaaaaagccagaggatgatacagataccgaacctctaagctcctcacctctcagctccccacctctcagctctggtgaggaggaagaagcggaagacccggaagcgaacgctgctcaaccaagcatcgagaagaagttggatatcgacaccgatgccgatcctctaagctccgatgaagagcaagctagcgacagcgatgcttccccacctcgcaaagaggtaaactatacgactgcgactttggaaaagaagcttgcggaaggaaacaatagggcatacaatagcccacaaactcgcaatggatactctcgcaaaagcaattatgcgcgaaccctcagtgctatgacgggctccgatgacgaggatgatatatttttgttctcctcgcagagccacaagcggcaaagggcaacaaaatatgcctccaagccctcgacctatttcaacaggccatctttcccctcacggtccaccgagaaagaaatgacctcctcgccagtcgaagaatccccaaaagaacccgaggtgacctttataatgccaaaggacatcgaaaattcgagtttccgagaacctcgtggcgggaaagactcaaactctatatcgcacccatacacgaaggaagaatgcgaagcaatgttgcttgacgatgattcacctctatcatccccatcttcttccactttcgagcaaatgtcgcaggtcgatgaagtggcagcgaaagaagacccccaaccgacatcaccccgcctagccctgtgtccaatgtgccataaggaagtagactgggccgagctagaactgttcaaatcacagccaaagcaacgtattcgcgagcaaatgatgttctgtgaatcacacaagcttcgcagtgccatggacttgtggcgtgagcgagggtaccctaacattgactgggatgggtttgaagagcgcgttcagggctatttccccgagctcgaaaaactacttgtccctggtgctttctcttactaccgaaatattcttggtagctctttcgcaccagggaaagcgagaaactcccgtgtgagagtgagcgataacgagagactcgagacgatgacctgtggttattatggtagtatgggtgcaaccaaaatgtatgtggtatataagcccctgcttaatcggactacgttaacatttatgtctagactagaaacaatcatccgtcgtttttctgtggttatacgtcgcctagcgacaacagatgatcttatcaagacggccggcgtggctggctacacacagtctgtccttgtgcctgagttggctgtgctaatggtcaaggatgacatgaaggtcaacgacgaagatgcccgtcggattctgagggagagtatggacattggcgacagagtcaatccagacttcaatgttgtccccataccgaaagatgccgaatgattgtgggtttacttgacttcattatataccacgggttttatactgtttcatctgatttctggctgtggcttgtgatttatctctgttcgcccccattccaagggccatgcattttttttcattttgagcgattgtatataggtagccattatgataccactcatgttttgtcttccatctactggaacaccaatcgtatcaatcctcaataaagtccaattcgcgcataactagttagttagtcgttattacttagtaagaaaagagcaactcttaactagctaactatagatcgaagataaacattgtcccaaagaggcaagttgatggcgggctgatccgtgaggggtagctttgtcagccgataaggtgattgctcggttgatgacacaatgcggagaagctttccacctgggcaagattgcattctcactcttctatccttcatacaagatgagggaaaaagacatgccttattcggagaccacacctctgctggaggtcaatgtcgctcctccgcggcatagatatccccacaatgctgttcgtcaagcgtgtactatctcccttgcagccctactttctgtggcgactcttctgttcctaattcctactgccattctgcctcgagagcacggctccatctggtcctatttccctggtgctcatccaattccacatgaagcgtggccagagagcttcggtctgccttacgaccagctccagcagatcctcctcaatgtgccttccgcagataaggcccgagagtggagccaatactataccgcggggccgcacttggcagggaagaatttgtctcaggcgctctggactttggaaaaatggaaggaatttggggtggaggataccgagctcgtggcgtatgacatttacatcaactatccggtcgatcatcgcctggccctcttgaagaaatccggtgacaagaccgaagtgaccttcgaagcaacattggaggaggatgtcctcgaagaggatcctacttccggcctgccagaccgtgtcccagtgttccatggctattctgctaccggcaatgtgaccgcacagtatgtgtacgtcaactttggcacgtacagggattttgaggacctcgtcaatgcaaacgtcaccttggagggtaagattgccatcgctaaatacggtatgatattccgtggtttgaaggtaaagcgtgcacaagagcttggaatggtcggcgtagtcatctacagtgatccgcaggaagacggtgaaattaccgaggaaaacggctatgaagcctatcctaatggaccggcacggaatcccagtgctatccagagaggtagcactcaattcctcagtaaggattcttttccaaggtgctgatattgcaaagctaacttgaacaaggtatccttcccggtgaccccacaaccccgggatacgcatctaagcctggatgcgaacgacaagatccccacaactcaatcccttcaatcccatctcttcccatctcgtacaaggaaattttgccattcttgaaggcgctcaacggtcacggccccaaagcgtcggacttcaacgagttttggcagggaggcggcctcggctacaagggcgtagagtacaatatcgggccatctcccgaggatgtgctgattaacctcgacaacctccaggagtatgtgacaaccccgctgtggaatgttatcggtaccatcaagggccacatccccgatgaggttgttatcctcggtaatcaccgtgacgcgtggattgctggtggcgcaggagatcctaacagtggatccgccgcgttgaacgaagtcgttcgcagcttcggcgaggctctcaaggcaggatggaagccactgcgcactattgtctttgccagctgggacggtgaagagtatggccttctcggctcgaccgagtgggtggaagaatacctcccatggctctccgaggctaatatcgcatacctgaatgtcgatgtggctgctgcgggcactaatttcgaacctcgtgccagtcccttgctaaacaaggtcatcaacgacgtcaccgctctggtgcagtcacccaaccagaccgtgcggggccagactgtccgcgatgtctggaatggcaagatctcgacgatgggcagcggcagtgacttcactgccttccaagatttcgccggcatcgccagtctcgactttggctttggtcgtggtaaaaatgacccggtctaccactaccactcaaactacgacagcttcgcatggatggagaagtacggagacaaggacttcctctaccaccaagcttgcacaaaactctgggctctggcagcggcacaattggtggagtctccccttcttgcgctcaacgccaccgactattctcttggccttggatcttacctggaccacatcaaacctgcggcggacaatctcccggagaatactcaattcgaattcgcacctctagatagggcgattcttgagttccaggaatctgcaaaggctttcgatgcctttgctaccgacctgaagtcccagcttggtgataacgtgccttggtaccactggtggaagaaggtgagactgtggttccagattcgcgctaccaacgcgaagtacaagggcattgaacgggctttcttatatcagcctggtctagatggccgtgaatggttcaagcacgtcgtctttgcccctggaatttggactggttattcgggagccacgtaccctggacttgtagagagtctcgaagctggagacgtggagaacgccgaggtatgtgtttatttgcgaccctttctgccttgggtacaattactaactgatgggtttttagaaatggagctccatcatccaggatcgaattggtgctgcgacccagttgttgctgtaaatgggtaagcagacttcttacctcggtatgatagagagttggatatacagcaccgctggccttgaggatgcacagatatatcaatataaacaagtctcccgaggaatcggggtcatgtaaacagttccgaacacataattatatagttcccagcattaaattatgcgtgcacatttaccccggacttcgtcatctgactaatcaattgcatgaccgagcttcgtctgcgttacttacatctctcctgatctcaccctctctcttttgacctacaatccttttaacaagcagaaaagaagagacaacctgccttaaaatctacaagatggtatgtccttagatatacttataccacacctccaatccatcctagtccgaccctccaaggccgaatccgaaccatcagcaccatgccaccacccatctcgtacatctttcctaaataacccaaaactaacaaacccaggcatcaccaacaagctccgccctagcgctctccctcctaaccagcgttggcgggataatcggctacacacggactggatccatcccctcaatcgccgccggcgtatccgtcggcctcgtctacctcttcgcattcctgcgtctgcgcgccggccaaacctacggcgaggaacttgggctcctggcctcggcagtgctaggcggaagctcgatcccgcgtgtgatcaagacgggtggaaagcctgttccgctcgttttgtcggtgctggctacttatgggctttttgtttttggggttgcgtttagggagaagagggcgtaggaattggaattgaaatggaaatggaatttaaaatgttaaacacagataatggagttgaatcattgtttgttccttagttatatccgtacgtcatgtcagtctttatcagctatttgcgtattggctttggttggatgctgtacgaatcgatgctactttacggagacaaggtacatcataatcgaacatgcattggtagataatgagaagcctaccggagaaacgctaaaactcacagcagccgtagatggcatcatttttgccatctcggcattcacatcaaacaaactcctccaggccagggttaaacctccagtggggggccaggagggaggatcaaagggcaggcacgtactgtacgtaggccgaacgagcggctcaagggaaccgctcagttctttcttttttttgttttcaactttttttgagttttcctttttcatctcgcagcatcgtactcaaacattaacgacgtttcctgggtttgtcgggagagagatggtgggacgggggaggactcgccaaactagggtttggaatcagggccactgatgaaaccaaagatccagccaggagaatactcatatgtaactagaagttttggtgtgtcgacttagctgggttccgtaagtccaccacttgcaaacgcagcaggaaaaaaaaaaacaaagcaggacttaatgggccgggtcgatcaccgtgtcggagtcttgaatggcgcccacgattgcgttgccggggatctcgccgaggacggtctgcgtgcttttgtctgggacgtatgcatatcgaggtagctgcgccttcttttcctcgggactaagcgtatcatcattgtaaatcattcggatcgcaggcttggccttttccttcttgggcttgctgctaccctctgtcttcgaggcggcatcatttgctgcacctgaaatctgattgtcaacagggaaggcgttctcggttggtcgggcgctggatccattagagtaaccagaaggtgcgggggtgggggggacgtgtcccatgtgcatctgttgcatttcgtgcgcgttgactgaaggcacagcaaaagcaggacgctgaggaaggctcgatgcggccggcaggcccatgaatctgttatcggatggtggaggctgttgctggtggtaagggggagccccataggagactggtggctgtgcaggaagtccgacgggaaatggcgaggggtatccggagggggtgtagggcgaggcaccggggatctggtgtccaccaactggggaatagcttgaatagacaggactgccagtctgcgagaaatgaggtgtcatggcggtgggaggaccaccataaggctgagggtaggagtattgcggagtggctgcgatctgaggcgatggtgcctagtaataattgttagctcccaatacacttcacgttgaacagaacagcagaatacgactcacgtatccactgggtgttggtgtagactgaacagcactagagggtgtcacatcaccactgctacctcccgcaagcgcctcagcacgcctagccttgtgttcagccagtcgcttcttgagctctgagacaggttcaagcttgggcctcttggccggttggccgccagaagaggcgccagtaggagggttgcctgtcgcatgctggcgatccagctcagcctgctgaaattgtgaagcgacacgctgctgatgggctttgaggacatccgcgggaataccctccatgccaaagatttcaatatcgacgcccatgcggttcggcagcgcattttggacctgagtcaattgctccttgtggacctggctcaagtgcacggatagacctagcgacacaagccatcagtatatgagatcactttatctgataaatgcaacttacctccggcagtgttcagtctgcgatggcagttgtcacacttgaaatgcttagctttctggtgagagatgagaatcttcaagtcatcgaagtcacgttcacagtagtagcaccatgggcgatcgagaagctcctcgagagagggaccgcgtctttttttgcccattgtggtgttgacgttaacagagacaagattgattcagatgatgttaacagagacaagggtgacttcaaaaaccgtaaaatatgtgtgcgattgcaaaggagggatgaggggaggtatgtgtcgcagatccggaagcttgccatgatggatgaggccctttatcacgtggctgcacgtgatcaagaagtatgaagttgtgagtgagaaaacttttgagcggtgaggacgagttgcagaagtttttgctctccgcctcttaaattcgagggaattttgagtcccgcgatctgctacaatagggttcctcgcgtttattcacttcctatcgctttgcaggtccggaagcttgccatggtgtatgatgctcgatgatgcccttcgtcacgtgcctagcacgtgatcgggaagtatgcagtttggagtagtatgaacgagttgcatgagtttttgctccccgtctcttatattaaggataattttgagtcgtacagtctgctacaatagggttcctcgtgtttcttcacatcctgtcacttcgtatatctggaaacttgccatgatagataacgtccgttgttacttggttagcacgagaccaggaagtatgaagtttggagtgagttgaaggagtttttgctttctacttctcacatttgggaaaatttctgagtcgcccagttttctatatcagtttctttgcgtttcttcactttctgctacatcgcagatccggaagcttgccatgcatgatgcatgtccttctcacgtggctaacacatgatcaggaagtatgaagtttgaagcagtgtaaaggagttgaaatggtttttttgcttctacctcttacaactgggaaacaattttaaatcactcggttttctataacaggtttccttatgtttattcactccctgttaattcaatgatggatgccgcccattatcacatgctgagcacgtgatcgggaagtatagaaaacatcggagtagtgtaaaggagttgaaggagttgaaggagttctctgcctcttatatttgagaaatttcaagttgcgcagtccgccacaactagtttcctcactctcatttagttcctgttcccctgggctactcttgcgaaatatattggagtatgtcagactgggatatggcaccttggtttttcttatggtctagcggtaaaatacgctgtatattatccaatagagtagaattcccattatactacttctgaataatgatactaaaactattatctgctacaatacagatttagcgtggtcagatgctgatttatataccgtttatccatcttgaacataatcccgaatctgatttccaagatacaatctaaatctttggaaactagtgtgtacaagttaagaattacagatggagaccgaaacttttatacaacatgagtttgaaccttagaatacatgtactggtgcccctggcacatactgccaggggcaccagtaccttcataatgtatcagatcatcccatccccagcccaccccccagggaggtccgaggccacaggaaatcaccccaccccggtttataccgcgggctcagcccagtcgcgaagagggccgtgcaccaagcagtgaatgtaaaccggggtaaagatgattccctgcgacccatcccaaaccctggggtggtccaagaagaaatgatcatttggtgttgaggcaatccccagtcctctctctctcactcgggaaaaaaagtgagatgaacatgaagtaagataagagctaaagtgagagagagaaaactgaggattgcctcgacaagagccggcctaccctcaatggcgtgggtcccgcgggttatgacccgggaggggacccatcccgtggtactggacgtacgggaatggggcgtactggggcggcataggttgccccagttgcgccattggcgcaacagacgcagcagcagcaaaagggttcactgggccggggccgtagtgaggcaccacccccataggagggagggtgggaggcatgggctgctgctgcgcctgtacgcttgccattgagggcaggccgatgggccccttgggggcgaggttgccagcaagtggtgccagcgaaggcgaccgcttgcggcggccggggccagtgggcttggggacctcgtcggcggcgccgtcgacggtccggtcctgctcgatctgggccttggatcgctttgggttgcgaatccgtccttcccggttgaaccggtcccaatgatcgagcatcgccttggtcctcttggggttcttcgaattggcgatcttctggcgcctggcctcctcgatcgcctcggcagagagagcctccttcttggccgatgtcgaggtggactcgacagggctcgcggcggccatcggttcgacggccgggaaggaggtctctgctggagggatcgatgaggaggccaggctgctagcgccacgtcgacccctgccccgagatgagatctgagttggggcaggggtgacttcgaaggtagcccgggaggaaccaaggcgaccaagcccacggccgcgtccgcggccacggccacggccagagctcttgcgagagtttgcgtcggagtgagttgcatcggtgacgacagttttgccgccgcggcctcgggcgcgccgctttgccgggtggttatcatcgtcggtttcatcaccacccgcactctcattctgagtctcttccgactcagtggttttggttggtacttcaacctcggcggccttgcgtttccgagtgactttcggcacaaggggctcacgccggggttcgtacatctgagcgtggtattcaagaccatgtttcttcatggtcgcccacccatcagggttgagatcaccattctccttgctcttcgcaatcatctttctggcttgtgcgggagttggaacaaagcctccctgcacaaacggatcctgctgtgtgcggatgggcacaagtggtgtgttgcccgggaagtagttgtgtttgtagccataaagcatggcctctttcttttcctcgaagtcaagcttgtcctcattgacgttagccagaggggctccacccttcttcttgtgaccctgcatttgatgtcgctttgtttggtatgagggttcatctcgcttgtgtcggtgtgccttgagataaaggttgtcaagggctagatattcatcttggagtgttttcaaggtgaatgcggcggtctgtgtgagtgcgtagagttcttcgggtgtgtggttttcgggattgcggagcatgctgacaagctcatctagttcctgagcctgtacttcgaggaactgacctttctcgaccttggacttcttgtatggaagcgggtgaggagctggttcaggagcgtcccgtttcctggtctttgaagggtcatggaaagcattgtcccaagtggattcacacttggcagcttcctggatgtagttgggggagaattcgtcggtatcgtgaactttccagaagcgctcaaggcgctttttcacatctggacgtcgccactgtgcctcgcggaggcgatactcctcaggatatccagtacgcggattggaaagccagtccaacagatcacgtttcgtttcggggatctgactggcattgacttggattgtagttggctggatgccattgttatcgtcagtggtcaattccactgcgatctcttctccttcttcatcctgagcctcgccatcttcgggcttggtggcttggaccatgggctcgtcatgttcaatggcgtcgtcatcttggagatcgccattctcgtcgtaagtgtcatcggcgccgtcttcggcaccatcatacccagaaaatctgatggttttcgggtgaacttcgttgacatgatccttcagaacatcttctttggagatgcctgcgtcatttgggagcatcaaaagcttcccacagtagtcacacttgagccgtcgaggcacgggctctggagactgagagatttgggtggatgtagattggggacgaaagggttcagaaaattgacgacgtagcggggagtcctggctgtcaccaacatccgatgaaggattgtccacatccaaatcggcccttgggatgggggccattttggaaataaacagtggaggaaaaaaagaacaagaggggtataagtgtttcaatatccaggagaagagaagaagaaaaaaaaaacacaggtctcaaatggagaatgaagaatgtcaagaaagaatctgtatagatagtcagcgtgggttcgcctgcggtgccaagacgccagtaaatcgtagcgcaattccgcggttccaaggccgaaggcacgaggcatggaccagcgcgaacacaagaattgcaaaacattgtaaacccagtgaacgcgacatgtaacatgagaaaaagcatgaaacatcagatacggtcgggccaaaatgcatggatcaagatctgaccgggaagtacactgggaaactgtgccatacaaaaaaaaagatggaaaagacgcgacacttaccataagatgtttagaatcgagttgaatccttgtgggcaggacacacgagtcacagcgaatgactgctggctgttagtgagttatgcaaagaaggatgcagggtggacatgaatggctgccagggatggtgtacttactatccgactgaagaaggctgggtagttgacagtccacttattgagacgacgcgaagtgggatgagagaatatggaggggggatgagatttaggagacaggtgaaatagatgatatgtcagagaaaagtacgttgcaaacttgtggtgtttggcgcgcagatcttgcgtcgctgggtagtatgaagaagaaaaaatgatcttcgtcgacgcgacactgcgcaaagaagaagacacgaaaacaaagacagcaaatgaagtgagagtacagaacagaatgagcacgggaaaggaaaataaatgggaaggtgaaatgggttacagatgatgaagttgagaagagattgaggttgagagagagatagttttgtagtttcataggcagtggaaaccccgtcctggcccgaccaatcagaggcgtcgtatctactagccacattgaacgacattgaggaaaggggggtttttgatttggattgatcactattgatcgcggatttgattgattctatgcattgtattgatcttcaatggcctattgtctttattcctgcattgttacctcttgttcctattttcgtttttttcaacagacgtcacatgatgcgtactttacggtcgaacaatagcaagctcctcgatagcatgtcgcctcaatagcctcaatagctagctattgaggtcaatagtgaaaaattagagtaatgcattttgggcgacctagtggtaccgagctctatgtgctgtcttccagccgctttctgtgacggtctcgtggactcctatatccataatccaagtcacgggcaagcgataggaagaccgaaggccgaagatttggatgttattagacaggtagccgagcacggtggatacatccgtgggggactgcccttgacctccggtgcatagtctccatgccttgtgtcacaaggaacggaaaagtgacgccccatcccagttgggatatagaaacaggaatacacattgtcaactcttcctttattatgtctaccttgagtgtcgagagcacatacgacaagttctgcatatatcccgacaactgtctcctatcctatccgtacatcaaatcacaagtagaggcagcagacatgccaaacccacaattataaccgttcagctttagcctcttctagttttaatatcaaatatgttgttataacgttcgagaagaacccttgtggcaaccgcctcgtcatcagcaagaatagccgctcatgtctccttcgcctatacgacatatttcaaccctccagggcttgtcggatagtaactcagcccggatttgttcacatccataatgattatctacatactaagttggttagttggatataataacttgtcgcattcgtcgttgccattctagtgtagaattttcccaatctgttagaatctttattttcaacgtcaaacttgatgataatctctattagacacagttttttttacctaaggacactgaagagagacgaatcaaaaaaaaaaaaaacgaaagtaataaacaaagatataagaaggagaaacgacctggtgccatttccctttccggactgaaactgccgccgctttttttcatggagtagatctacctaggccctggggccccggggcagatcctatcatcctacaattcatcctcggcgccacatcacaataatattggtagaatgcatcctaaaactatctcgccatcaaaccttactattgatatttgcccatttttgagtgagtacccgtgtggccagagaaaaaaaagaagctccctctgggacgaatcaaggacttcgtcattacgagtgatgtatactccgtactaaaggagctaattttgaatatctcgagactggcattttcagtcaatatagcacggtactggagctctcctgtcaaaaatgtaccctgccatatgtatgtcaatttctcatcggggatgtgcaagaactagattcgtttctaaaatgggtacataccgatctccaccactaaagcagcagccaaaaaactctgataggcaatataccacgagtgggtccccggggtcgccccaattttccctggaatgttccttagacccgtgaaatgccgaggtctccctagaatatttctagtacatactagccctctttaggcagatttacgaattgtatagaggtctttatcctatgggaacataaaatgatctaaagcagagaaaaacatgtcaatagggactagtttagcgcttttttgttgaagtataagacatagccaaggtaggatcccaaagcactacatagcaataagtagtaagctcaataagagtatagtagtattatcagcacataggtggtacaaagtgcctagaaacatacaacatactgcagggactgtacacattctatacaaagacctatagcagtgtcgcaccaaaacagtgtctatcctaaataaaagtccaatattggttcgacctgacactattcaatcaaaagcattccttaaaacattgattgttaaggtacgtcgatgactgcaaagcagtaactatcaacaccgtgctaattatccggagagagcattaatctctggcttcaaggccatctgtgattatactagtagtcgcttagtttatctattgggtaacctcgaagaaaagctctaacatagcccggtatacgcccttgagggctagttggatggtcttagagatttttgcggaattctctgatgttgaggcttctaaaacttcagcaaccgcagccaaggttaccagctacgaatcattcgacctcggctctcctgtctacttaatcttgctatgatttttggtcctatgggaagcatgcactcggaaaaaagggttgaatcctgcgtatatgacgattattcttctataacatttttcctgttgccatttggtaaaacataatatcaattcagtaagcctagggaacccaacttagataggctcgtcgggtggccaccttgggagaatcacagaacatatacccaaaggcgaagagtcaatcctcagatcatccaagtcgaatttccatgcctttgcaacccgactatctggttgatatccggcacgagattgccattccaacgtactggcgttggagtggttgtgaagatgaagggaaaaccggcaatagcactccatacgaaacgtcatacgtttcaaacagggcatacgttgggttgcatagcccagcgatatgagaagccgatggaattgctcatcattcatcacggatgttccgttccatctccgttcggcatcgtgtatcctgtcattccagttgtcattctcgattttggctcggtactccacggtgtgattggacgtccattgtcctagttgattgccttgcttttagtggctatagatatactaatggaaaagagatattcattaccacaaggaagccaggggggtacatcctgaatttccaatgttttcaaatagggccagtgcaaggagcctataataggttggccttttccatccaaaggacacaaaaagtcaaatggaagagtggttctcgccaacttcaattcccgaaggtgaacgctgagatttcgcaaattgatggccaggctatcaatccccgaagggatgacatttagtccaggtaaactatgtttccacgggccatcctccgagccgttataatgtaacactcttaggctgtcaggaataaccccgagcaaggaagccaatgctatatagctgttaataaaaatctagatgaaaagacatcaaaaaaagtacaaggcttacacgctcgacgcctttgtatatactgtaagtaatccggacggacccattcgttgagatccagctccagttcagtgatggttggacagtgttggataatagtctgcactgttccggtccagatttgatgatgccggtttctgtcgaaattttggtttaggaaagagagcttatcaatgcactgaacgtgcgctaggtatagctcggacagattgttgataaaacgcgcccgatatggggggatcggtatatggcgtctacccctgtaatcgaaagaaagcgccgcactagcggtaggacagggcaaagtatctggttccattctaggccacctaacgtgttgagatcctcgaagccctaggtgcaacgtgagacggcaatgctggctccatgaatgaagtgtttggaaaagatcaaacatagccgtctggaaagcgaaatcattggcctgccttaattggttgtctgcgctatatttgctgttttcacttgtggtccagtcgaatattttgcaggggatgatgatatcgtactccagctttcggatccagtttcgccgtatggaacgactaccggatgtgagtttttgaaaatgcgttagagaaattccacgttgcccctcctctttatggtaactgtcactatagacagcgagatttgcatatatcaacggctcgagggctgcctgccaatagcgacacacataagcgcatggaatcaaagaagccccgtcaattcgcaaaagtgttgcgatttcaaatagcagttccaggggtagtgatgtcgccattatgctagcgagtccataacactgagtatcgaaccaggatgaccttgcaaaagaaaatagaataattagagaagaacgagaaggctaagctagaatcaaagggaaagaaggagttcttaaaagaaagataactagttagaagtagtgtactttataagtgcaggcttggcgccacgttgcttggatgtatcacattctgctgtcagtgtgatagatcgtcaggcgtattgggctagggggtcgaacggagtagaggacctcaatactgatacacatacggagtacatacttatctcctaataaaaaaatgtcaatagttctttaaaaccatttgattttgcttataacaccgacagctcagtgcaggtggttcttctcgccaacatccaaagccaccaaaaagcgactaacacaattataagccgcaatcgtagcggtgatctcaaccacctcccgttcatcaaagcacccccttagctccgcaaaaacctcatcgggcaccgtaaccgtcttagtcatggcgtcggtatactttagtacagccctctgctcagcactcaagactgacgacgcagcctcactcgagaagtccacctggatatccctaataaattgcaatgcctctgagcccaatccaccttccacaagcagaggtgcatgttgttcccattcgaacagggcgccgttgaccactgcgacgcggcagatggctagttcacgaacgacagttgtgagggtggttcgggtgcggatcgctccaataaatgagttccagccttctgtgaccgggtaggagtgtaggagggccaggtcgagggggaggagcgggttgggggctcgacgggcttgaacgctggctaggattctggcttcatccggcgtgctagttgctggagggtctgcaacgtaagggagacgcatgatgggtggtacgtaagggttgtaggtgatcttaattagaagttggtatgttcaatggctggatttgagtcgaatatggggtctagggtttgctgtcagttgagatgtgactcaatatgcagtgctttggagccaatggctgcttggatgagacgcaagtggtcagtacctgattcaaagctgtaagatactattgttgaacaaatcggaactggctctatacgggaatcagcaactatttatcggcaaccccgcgtgggtccatagcggataagtcaaagccgcgggagtcggggttgcgcttccgggttccgcaggaattggtttgatgatgttgaaattgcaggtacgcatatgtgaagagagtaagatgtgaagatgcgaagctgtgaagattgatatcctgtgctctctagggatttgtcgtgcggggtgccagatttaaattcaaggcccaggtgatccaacatcaaatatatccaaggcttatattttctctgtgaatctaagaaaatattcagattacagaattaatgctttatcttcatcttttaactgatcttcaccaagtccatccgcagtcagtgctgtcggtcttggcacatgatccacaagttcagaagctcccaaggtgtcgtcacttctcctgaacattgttccccccaaacaaacatgcctccaaaggcccctaaacctaccagtgacgagcttctggctcagtttgataacctcggtcttgacaaatccggcaataaaacagctaaacctgtcgtatccgacaatgtcaagggcgggcaggaggacatactggccgagctggaccacctagccacacagcgtccagccagcggaccaggtactccgcgcctgtctgccgataagcctaggtcatctacacgatctccccgcccgagcgcgaccatcgaccgaccgaccgaggacaaggcgccggtccgccggtctgaggagacaggccggctctcacgcacagaaaccaagccagaacagcccaaggctgagtctgagaatgtccccgcacagcaaccatccgatgagggtgccggctggtggggtggatggtcggggggactgttcgcaacggccaccgcggctatgaaacaggccgaggcggctgtcaaggagattcagaacaacgaggaggctcagaagtgggctcagcaggtcaaaggcaatgttggagctcttcgtgatcttggtatgaatccgcctactcaaagtatgctctcttacatgtagggctaactggcacacaggcggcgagcttcgagacagggcactcccgacattcaccaacctcatccacaccctcgcccctcctatttcttcccatgaacgtctacagatccacgtgactcacgatatgtctggctatccggccatcgacccgctagtctatgcggtattctcgcgagtgatggcccaagtcgagggcggggacctgttggtgatccagcggggtcaggagtcatccccgaaacgtgcgctcgatgtgaccggctacatgaccagtgctggctggaatgacgggccctggtggcggacggtcacacctggacaaccgcggaacatctcttccgttctcggcgccgtggaaggttccaagctcgctcgagccaacgccgagtcctacgctgccgagtacttctcatctcgtggcggagtcgaagaggccgcaaagcatgcttcggaagtcctgagtgaatccaacccggtccgcagcagcgacatctttttcgctatccaggctatcagccagactacttccaatgacctcttccaggctggcgcgacgggcgaaaaggttaccgaaggagccgtggaagctaatacgcaagaagaggagatttccttcgcgatgtacctccacgaccccatccatggcattgccttccacgccatctcccagagtatccctcaggcatggattgaatggctcgatgattcggttctagattccgagaagtcagacgcctatggtgcgaatattcagcgtgttgtggtgcccgaagccattgccgaggtcatcgagggtggaggtgtcgacccccgcgaatgggtttcggagtggattgaagaaactctttcgttgaccgctggtattatcgcgcagcgatacgtggcccgacgaatgggtgtcggtgagggaggtgtcggcaagggcaagatgcgagctgagcaggtgtccactgtggatagtggcgcaggagaagctgcgcgtgcgctctaggactgccgtgatcctataccgagctcaagagctaatgctcttattcccgaatctcctgttgtttatgtgatacacctgctgacttgtacctgcactagctatttctatttctatatttcagtagttaccccaggctgtctagtagggagaatgaaagcaaatgaccattatcgaaaccgcttgcaaagagaagatcatgtatgggattcccgtatatgtatacaaggatggtgtctgtctctgtgagaacgacatgatccagttggctcgatggtggttctttttggtctttttagtctttttaggtattgtttttatagaacttcttcctgatgttccattagacggcagaaaaaggcttaaattttgcagactttctatgtataaccttaaaacggaccggccttcctataaatcaccatattatgtatgcattcgaaaaccattgcgggtatcgtaggatcatctaaagcatttagaatctgttcaacaacctattcaagaatcaaggtccagcggcccttcaagaccggggacatgccagaagttggctcggagggcagtcacacttgatcacaattagcatatccagttccatccgctcattgcaaaaagaacatcttacctagtcgacccattgagcacagtatgagcatccgtgccaacctcactctcctgcaacgtcttcttcatatccgacaaatcagcagaccacttgaagtggcgctgtctggctggcgcatgagcatgtccattaacatacgtgccattcgtatggccattcatatggccattcatatgaccattcatgtagccattcgtttcgccattgacatgaacaccgttcacaccattaaccttctttttcaccccctcctcggcatacaaacagcccctgggccaataatacggcaacgtgtgtgtatacagcacaggcctctcctcaacatccagaaccatcgggacgttgatattataaagctccacgcgctcatcccagttctcaaacagatgccgcacgactctgacagccagtctcgcggccgcggcaataacatcatcaggctgcggatccttgctaccaaacgagatggcaatcccgcgcttaccacagaacaccgcttccagcgcaccgcctaccgtccccgaggacaggttgtagatggtagaggcattgcggccgtggttcgggcccgagatgacgaggtcgataggcgcgcgctcactgaacaggttgtacagacctagttgtgcgcagctggctggtgtgccgttgcggatcactacccagtcgttttcggggtctggggattcgaagctcgtgtcccagctgccgtcggcgtggaaggcgtctgggtgtacgtagcttgctgtgagggaggcttcgattaggtgggctttgccgatccaggagcgtgaggctgccgggattgctacggagacttggtggccgtttgctttgagggtgtcgactagaggtcgaagatatggtgagaggttggtgcttggtggaccatcatcattgacgacctattttaggttgttagcatttttgcattttttgaggggtttatttttttaaatatctatgtcgtgtgacgtgaactggataatagatgcaaggaatcggaatgagggagtagtagattgtcatgtgacgatggtttccggggaagtatataaagcagacccttgcaggaaatgtctttctatactctgtactccgcacacttgctagagggaaaagaaaggaaatttgccaatgatgtcacttaccaggatgtgcatgacgggcgagattgaacagcgccaaggaggttatgggtgatattcgaggttcgattcggatcggtaaaggttccccggtggcggtctgggcctttctgttctctggtttttcttttataagagaataagaagcagaagaaagaaatgttcagcaccccggaaatatccggggtgcagaacacttatacctggggaatcagggtaagaaggaatgagccattggccacaccgaattacacaccggggcattggggtgaagccgttcatgcggggacagcaatgggccgaatgcagcatgcggtgagccgattcggctttctctcggacatgctgaccatgtgttttctgtcatttgatagatggtcaagggttggcacggagtacggagtatattattgcggagcgaagcgaagcaattatgtactcgtgtaagtgacggggtcaataggataggggatgtggggtgttaatagtgttcatagtctatagttcattgtaaatgcagcttcagtcattcgccacctatattccctacatatagtctagaaatggatatccagtgtgtacaactatattgtatatccatatgcggagtaagatatatataataattagtcggcatcggtaagaacgagatgatccaattggctggtagttcttctctaatatattgtagtcttttcgatgttctttgttatcttcacttgctttttgggttttcttaaccttcgtcgttcaataataatccataacctatgggcttaaatactaataggatctatacttcttagtcgtttttttatagtcagaaggttagtgaaagtccaagtgggaagatgaggtaatcaacgctgcaggggagtgctgcaacctacacggtagaacaaggtctggatggaaattagaaatttcgatttggactttgtcgactggggactgtcgactggaagaagaactgagttacatttaatatttcgcctaatgcgcttgcttagacggagtactccgtacggagtagaacttccgggttcctggaccattcatgactcaggggcgcaccacatttcctctcataagaccagaccggagatcgacatgccggtatacaacgtagagcctgcaacacaatacattgtgataatgggcctttctatatatctatattctcatgtatttcaatttagttgggattccaagatttaaaaccaactcccatgtctatattcagcatagatcgttgtacggagtactccgtaaacaagagcgaaatcctaaagtggtctgtgccggctgcacgctaaagtcgatcgcagaaaatcttgaggtggggaaccccgtcagcccttcaacaatcctctggcccctcaactctctcctcttcaagtcattaccgatatatccattcgatagttacttggacacgttgacaaatcctcgctgaccggcataactccattctccgcccatcgaacctgcgaagtctcaagcgaagttcgttgagatctttgctcaactaggtcgtcgccgctacctcaccctctcatcctgtatggactgtagaagtaccgggaccgctgcggggatcgaccccaagattctggacaattggcaaactgaaggcaccttttctgtcgcctcatgggaacatctgggttacgaccaatcgcccgagtgggacaccagccaagactcgagccagtgcgatgcagatatcgcagacctaggcaccttccatggtccactggctggtgaattccgtcgtctggagaacaggtccggaactccctcctgaagtgagaccgcgcagcgcgatgttgatatggctgacacttgttttgttacagaaagcacgatgtgtcacccgagaacttgaactaccccgatggcctcgtcgagggcactggcagtggcacccttagccctaagaccatcccatcttccaccgacgagaattaccattcggacgaggcttggccacaatttcaactatacaacccagtcgccatgccgatggatgcacctcttctctacccctacgcgaaaggaccggaccactccaatggcgctgtcattgtcgatgatgttgaagagatgcctcacagtggttattcggatgtcccagcggagggcatcatgtcgttccagcagattccacagtcctttcctatgattcccgaggaatggtctgtgattccacatgacattcccgtcgaaaatatgcctctgccgcaagagcccatgctactctcagtggacacacaggggaacccaaaggatcactccctgcggggataccagacttctgtccgatcgctggaatcgcggtggctcaatagtctggcatcccaagtacccgcccaacagatcacctcggtctctccaactgctggcccgcgaaatgcacgaatggggcaggagttccaattcaaatctgagaactcttcagtgtcgggcgatatgtcagcaatatacgagtgctcctattccgccactagcgatgatgccgatgccccggcatttgcggagcgccagatggaagacgatgatttccagtggaagacctcatcgcatgaatctacttcaccggaggggtcgcaacctgcattcaaacccactgccttcgtggtgagtgaggcccccgcggaatctctagtttccactgttccctcaaggccaaggacttcatcaactgctggccaacgtgccaatcgaccggcaccgcttgccatgcagtcctcggctacagtcaagaagcgcaagaccaaaaaccccgcttcaatggatcacggcataacaaggccattgcaaattgtccaggaggatggccaagggggctctattgcgtctgcggactttgtctcgcctccacgcggcgctcgtcgcaagggcccattgagtatggttggacgggccaatgcaggcctgcgcaggaaaaacaaggatacttgtgtccaatgtcgactgaacaagcgcaaagtaaggatttccacgtacatttgtgtattttcataagctaacctgtttgcagtgtgacggaagcgccccctgcgatgcttgtcgccctacacttcatgagcaaccatgcgctcgtgcatgcttctccagtattgtcgagtttggaacctgcaactacatctgtatgtatcgatcaaaccctcccatgaggtattcagatttactgactttatctagctcaacgagctgtcaaccaccctacggtggatggttccaaccgagttcggatggagattccatctgaatttgacctcagtcaactcgtgtctttgctcgccgagcgccagggacggttcaacatccgtgctagccaggcctggggctctctctatgtcctcgacttgggggagacctacaagttcctgaagaccctgagtgagtacaacggcaactcgaagtccactttcctagagttcatcgaccgacgaattgtcgactcaaaggataaatccaagaattggctgtcctgcgttgccgactgcgacccaatgaatcaagcctatgtaagtgtccacttctacacgacaagaacgtaactaaccatcctcagaccctcctctcccagtggaacaacatgcctagccgcgccaaatacagcttcgtgtccctcgacccaacagccgaagagcgaacaatggacataaacaacccagaagaccaacgcgaaatcctcctcgcagcgcaactctcccgaatcttctgccgcatgctcgaagtcgagggcttccgcaagcttgagcgcgacttctacaacataaagtggaagcggatctcgcacgagacgcacgtccgcttcctgggcgaactcggccacattctgctcacgctgcggtggcgcgtgagctggtggaagcggctcggcgatggtggccataaccccgatcctacttcgcagcactacattgaccgcgtcgagctgctctgccgcatcctctacgtctactatacatgcgtgctggcgaagctgccctcctggtcagcggccgatgtccctaagggtatttggtcgacgtatgcggactcggagaatgccatctgggacgatttcccctcggactccagtgacggcggctttaacggttggatggagcgtggccaggagttgattgaacaggctggtgttccgagccgcatctcgaagttctgagactgggatggtagacattgcctgcgaatatggttcggatggtaatgtcattggcgttacaattatagatacccttttttttgctcgtttatttccttctcctcgaggtttcgttccattggatgcatcatgacttttacatgcacgctctgccttatgatttgatgatttcacacatgttctatcctattccgcttggtttccgccatttgtacttaattactatttctcgacatatatacacttcttctcatctccacttcatccatctcgcgtccatctcatactacactatgcatacatataaaccatccaaataaaaaaagacaatagaaactgggtatcgatttcatgcactcatataacgagctctagatagacgaactgcaaagatcgaatcaaacagacaaaaaaaaaacatatcatccattaattccccgcccttcaagtcgccttcttaggagcagacttcaaagtatccttgcgagccaaggtcccatccttccgagccgcattacgctccttcagcagacgatccttctttccaccagccagcagctcgagatgacctgcctttgtcgccagactgcgttctgtcattgaggagaggccggatgtgagttgctaagcagcggtgttagtggttgttcttctctggtctcgtcttcttcttcttgtctcgaagggcacagactgcaatccgggtcgaagatatggggactgggaagcgagtcggtgcgtaccttggtcagtctcttctgcttgatcaggccggctttcttgggcgcgacggagcggacgcccggtcttgttgtcttggcgggcctagagagagtgtatgttagtttgattgctccttagtggacggatgggactgtcggctgtggctttgtggttttgtgtctggcacttacttcctgcctgggcccgtgggaccggcctttttcagtgatccttgcaccatatttgtgttgggatggaaattggaatagagagaattggtgaatcggcacaatagaaagaggtaggcaaatttttgtaaagtagcactgccagcagcacaaagtgattctgggcttctgtctcttttttcgggggggttgctggagggaaaattacttatcggcttatctggatcacgtgtgttgtgggcctggggcatgtattttccgttccgaagtatatttgcctggtggatataattttggtgattatgaagaggaaagtgacgatggaaacagatggtgaataagaatgaaggtggagcaaaaaaagaagaagttaaaggcgagaacgaccggggtcgaaccggaacagttgaggtagtggaagatcttaggcacttccctcgtggtacacatgagtatgttaccactaggccacccactgttgattccttattattacctttctgtttcttttcttttagattttctacggcttcttctcctatgggcacaacatcaatatgatcaatatgattgtgtgcatataagaatcttttaatctgtttctagggcagtgtaagttacggttaatacatatgtatgataattagtgatagacctaggctagcactgcatcttctgtcgatatattatcttgataagcatgcaaattcaagtttcgaagtccagtctacttttatatgaagttgcatcacatattgtcccaatgataaacacatctcttgttatagcactcggctacccatcaattatatacttgaaccaaacctgttagtctactcaccggtaatggtagccaagaaaggcccaaagtaccaggatactttgttttcaagatacaccaatgtcccaagcccatactactctctaggatgaccgtatgcaattgagtaatgactatgatggtcaatattagtaggatgtcgtatgttcagactttactgtttttaccgtttgcaggatgttagatctcagagaggggccctatagtggtatttgctgtgtcacgttcgattttggcaatgataaaacatgtttcggtctcattgaagagtttcaagaacttggggggattttcccggcaagccgactgggaaaacgtagaagccgataactacatggtagtccaggatgccttcaagttgtattataatggtcatgtcctcaaaagtgaaacccttgggacgggtatagccccccacggaagatccgccgccaacagccgatcaaaaaacaagggaatgcactcccgaggcgaggccgattaggttgatcatgtttaacggctccgcagctcgtagctcaggtaccagacaccggggaggtaaacactgccagggaatagtcttgtgcctttcgatgtggaatgaaaccgatggaacaacatagatattttttgttcggtccatgtagagatctggaagatcttgcatatgatgaacgacggcagggaggtgctttgcggtcttggtgtattgcacttaccgccgtactaaaagctacctatcacctggaggcctgatcagatgccccccgtcaaccaacctaccatccactaactcgacttcagaaaatggaaggttcccaaaggatctcttgatttgtgggttgaaatgtgatagcttgatagatattgtacatgatgccaaaaaaaatcccgattactctcgcagcttaccgccagtaagtgcctcggcaagcttcctaacacgctcctgagagacatcccagcgaacagcctcattggaacgggtcttgttggcaagattgaacacagtcggggggttacccaggttccagatgttctcgccgggctggtggtcattgcgccacgccgggttctcgccctcggggaatacccggtcaatttcagcagtgagctgctcctcggttgtaatgaaagtgcgagcattcacatacaacgcctggaggtgctccttccgctcaatttctttctgtgcctgcttagactccaggcgtgcccgagagagggcaaggcgttcctcgcggttggggtcgggcagaactggctgtttgtggggcatcatcgcctcaatgatcgatggccgagtgagacgctcgtcctcacgctcgggttgctgaagaatgcggtcccgccgattctgactctcaagactgcggctgacaatctttgagtctgcggaccttttgcgcgagtataggtctcgcagaccgtcccgcaggttctgtctccgcagatctgccatcttgtgcttccattcttgcttctcggggttgctgctgtttgggctcactacccgttcagacttggggagttgtgtgaccgcattgagatattgtatccggggtttgtccgctcgacgggctgggaagagctcgcgaggcacgggtagagtacctctgatatgaggtttgcgggggttggtgggctgaacaattttcggcacatcgatgaagtgaggcgattctggcccaactcgaagattggaggaggaagcaaatcctcggacctgcacagtggcagtccggctattgcggaggacagacatacggcacaattgaaccctgtcactccgtggagtagtaaagctggcaggggattgttgtaaagtaaattatcaatcaagatcaatgacacggcctccagattaagccgcgacgtaacctgaggttgattaccgtataatagggaggatacgcggtcgagtaagtcggaagaaacagaagcgattttacctggtccgtgcacggtaatgtcttggcgccaaaaaaaaaactccttcgccgccttttatttttcttcctcttctctttgcactctgccactctctgtgtttggtcttgccttcgactttttttttcgtcaggcacttacttatcctctcatatttcataccacaaccgctatcatgggtacaggaaagaaggaggccgctcgtaaagtgcggcagggaaagcccgatgatggcatggccaatgtcaagaccaaaggtgaaaatttttaccggtatgtacagcctaagcaaaaatcctcattattttgtaacaaatactgacttaacacccagtgatgccaagaaggtcaagaccttgaacatgttcaagtctggcacgccgcgccgcaacgcgcagggtgatatcacagttgccgcgacttatcaatctaaagagttgccaacagcccgcatcgagccaaaccgtaaatggtttgctaactcccgtgtcatctcacaagaggctttgacctcgttccgtgatgctgttgcggagcgtgcggccgacccgtaccaagttcttctcaagaccaacaagctccccatgagcttgattcgggacaatgataaagtcaacggcttgaagcaacatcaggctaagatgaccatcgagacttctcctttcaatgatacattcggccccaaggcccagcgcaagcgcgttaagcttggtgtatcgtctctcgaagacctcgctggcgagacagccaagatgcaggacacctacattgagaagaacgacgagggaactcatgccgatggaagcgcaattgttcgcggcgacgacactgccgcggtcgaagacctgggtctactgactacctctcgtgaatctgtcttttccaagggacagagtaagcgtatttggaacgaactttacaaggtcatcgattcttctgatgtcatcatccatgtcctggattcccgtgatcccgacggtactcgttgcagaagtgttgagaaatatgttcgtgaggaggcaccccacaagcacttgatcttcgttttgaacaagtgcgatctcgtccccaccggcgttgctgtaagtctcactatttcccatttgatatcccttttgagcactcggtttttgttttcttttctgtcctgcgttttcctgttatccccctgttccatcgctaagtcaaggcttcttcctgcgacttcggtcgtgcacgacttcggttgtgcttgtttcaatggaattccgtctgttacagctttggtatattaacactggcccgcaccgaatttcgttatgaacctaggttgacttgctttcgtcttgaaggcctgtcgcaaagggccagctgtgttttgtttttgagtagaggtctgcttctgcctatttggtggcgttgtagcagacttcttagtaacatcccacacattctatctttacacaatgtttcattcattgctagtgactgattgctaactttgcatctttgactaggccgcttgggttcgtcatctttccaaggactacccctgtctcgctttccatgccaatatcaacaactctttcggcaagggctctttgatctcactgcttcgccagttctcatcccttcattccgaccgcaagcaggtgtctgttggcttgatcggctaccctaacacgggcaagtcttccatcatcaacacactccgaaacaagaaggtgtgcacagtcgcccccattccgggtgaaaccaaggtctggcagtatattaccttgatgaagagaatatatctcattgattgccccggtgtggtcccacccaacgtcaacgataccgaggaggacatccttctccgtggagtctgcagagtggagaacgttcacaacccagagcaatacattccggccgtgcttcgccgtgtcctgccccgtcaccttgagcgcacctacggtatcaagtaccaggagaactacctcgattggctcgcgcttcttgctcgccagggcggtcgtctcctcaagggaggtgaggccgatctggatggtgttgctaagatggtgatcaacgatttccttcgtggaaagattccctggtacacgcccccacccaagggtaccgggaagggcgagaaggacgagaaggacgaggagactgtcgagggtatcgagggccgtgagggtcgactcggcgagatgccccgcaagcgcaagttggatgagaacaacgagcctgccgccaaggctacggaggccgattccgagtctgagcctgctcaggatgaagccgttgatgctgaggacagcgataatgattcgatcgccaacttggaggtcagcgatgtggagagtggcgaggaggagtgattgctccattggtgttcttcaaggcactcgagtgtcatccccattccgccctacgaaaaacagacagtatgccgccatgagatcggttatgctagctcttgaaacaacagagcttcaagccgagtcattcttcctcatgtccgcattgagcggacctggctctccacaaggcatccggcatgtgcttttatcgcacacaagtctgaagaatgccttgcgatatgtcgtgcaggcctgcaaagcgcctgtcatctaaaagccacgttatcaaccgtgagcatcccagtacataatttgtacaaccctaggagttctggcgttttcagtcaccagctccaactcagatacccgattcgatgaggaatcaaaatgaatgaaaataattcttatttaaaccctttcccgttgttttaattagtatcttagtacgcgttgctctatgatccggtattacacctgctgccgagcaacccgtggatcgtaaggttcggattagttgggttgtggttccacccttcaaccacgggttgaatccggggagagaattgtggcagaaaatagtgacattcttggtcaaatccatcttaactaggcaactcgtaataaaagtgcactgagttcctcttcatcctttcatttgacccttccaaggtgctggacgagctaaaatgggtcgaagaccttggtagtttcgacgatgggtcggcaccatcctcaaaagatcaagcacattaagcccactacctggatctttgatggatggatcagctccagcacgcaggaggacatccgcaacctcaaagttaaagcgaaggctggcaatccacaccgctgtggctccagtacggccaccaggggcattgatatcgacgtctggttcggaagcaaggatatactcgacgactggaaccatcccaaacgaggcggcgtagtatagaggatgcgttccatcaatggctatagcatcagtcgtgtttgaagcagcggttgttcgtaacaggacctgtatccatgtgccataatttccgcggccaggaagagacctcgtagcaaagaatttatggatcatatcttgtttgcgctccccaaaaccgcaggcggcaccatgttgtggccagaagtttgcggcgcaagtcatgaaagcatgatcttgtcgtactttggctgggttttcggggtatttcaagtatccctgtgcaaagttgtcgagacataggtacgtgagacacctgtgcatggctttcaggtctgcagttgcagcatctagggcgaaatattggactcgagatgagcggatccaatcagatgttagaaaatctttgacagacgcatgcgcgagattcagataaccattttggtcttcagtgatgagtccttgacaaatgtcaagaataatatggggcgggacaagcatcatatcctcatcgagtgtcatgcatgtctcatccgtgaccacaacttcgttgagactcctcaaagtaagaggctgtttggtgaagctgagccaaaagagggcctcacgagcaatcttccagtcgtcaggggcaattcgttctaacatacttgcatatgtctcgcgtaaagtccctgggaggttctgtaaggcctgtcgcattgcccttacagatcgctgcgcgctcaggttgtccaatgagagctggacccagcggaatctatgaataaataattagatcacagaaagcatagtcagatcggtactgtactgacgatccatcggcatttccaagaagagtggattcaatttccgctcggaattctggtgccaaattgctcaatgtactatcagtctgaagtcggtatttgataaaggtgtcaatgtcccctcgtgactttccgcttatgttcaagacagatgcattggggtgtctgatggagcccatagtgcttgtggtagttataagcacgcggatgttcgtggataaactggcaagcctgagaagggaggcttcaagaagctgcatatcatggctttcattgattgcatcaaccagaaggacaatcttggtcgttccggaagcatatttgaggatggcagcttcgagaacagacaattcgatagggaacctatgcgcctgattcttcgggcctttgttatagatagaccgaatatcacccaaaattgaaggagctgtgcccgagagctgtgccacaagtgatcctaggacgttccttgcattctgagaggcaaaatcactgattgtacaataaaaataagcaaggcacatggattgaccttgagaagccatataagtgagttcatttgcaacttgtgcactagcgaaagtcagatataagatgcaactgaattgccaaatggaacttacaagagcgtagtctttccagttccagctttacaactatgtcagtggaatgtcttagaggttgcgatgggtacatacattttcccaggaggaagaaagatcgattttcttcttggttgagaaacatcttcaaataaccgtcaacgaaccatctaccagtcccatttctatgtctttttgatgcccgcagatgagagctttcagggttcacgggagcgatccattgtagaagctctctgttcaaaaattggttccgctcttgagctcgaatgtgcaagtcttcttttagtgtgtttgtcagatcacgaatctcatgctgcatctcccgatccaccgaattatggtccgccatgagaaccagtatcaaccacgatttgactctttccagacgggccagatggtcgatgacttgcgtctgagtaaatggccatttcagagcttgcttgaggcgcttgaactttgtctcggacgtctccaagtccacgagcaaggattgaaggaactcgtttgttgtgtgcaatactctcgccatgacgtcgcggtcaaataggcttgtttccgattcctcccatttggcgatatcagtagaatgtgctgccaggtgctctaagatcccctttagagcgaagagctcttcgctgagttttcgcacttcggactttgcggtctgcaccgctttgccatacctgatcaggctcgacagcacatggctgacctctattacgagaccggtgatagagatcgggtccattgggattcaaatcaggctaaaactggggttctgttcaaggtggttatcaggctgacaatagctgtgtgcgttgtgtaagctgcacccccacctgggtacctgggcactcatagatcagcctcatttcgctgtttcagacttcgtaaagatgcccgaattgggtctcaattcggctgaaacatcgagtctccctgggctaaggtataattaaactctaactctcctcatttcctataaagagtaccaaccaggcatataaggaaggtcaggagagatattgattcaaaagtgtcactatccacaaccgtaccttcaccgcccccaggtctacatcgtcatcaccggcagcttgcacccttattccctcacgtcaatgttaaaatgcccgccgacatgtctatgattccctataacggaggaaaccttgatgttgttttgtaagtgatcctcaaatatgtgctactggttatctaattgtaaaaggcggcacaatgactcggtggttgtctttgaccatgattctcagcagctcgttctccgcaatacgtcagatgaagacattgaccatttggagctagccaactgcccattctgccatcgctcaatgcgcgagaatagcagagaacgacattgtggggatactgagcccgaaggcgaatttattaatccaaactactttcacatgctcaacaatagcctccccagctctgcaacatcctcgactcctccttctccacgccatcgccttgttcagcctgcgctgccccgtcggcctattaataacgcgtccgtccaacctacatcatctccacaaccaccgccacagccctcaccacagggaatttcctctgcagcattcagtccagattacttcaagaggttctttgtggaggaacgagtgttaggcaaaggtggaaaaggagtggtgctgctagtgaagcatgtcctggatagtgtgtctcttggtcattatgcctgcaagcgcgtgcccgtcggcgacgatcatgagtggctagaaaaggttctgggtgaagtgcagctgttgcagcatctctcacaccagaatcttgtctcgtaccgtcatgtctggctggagaatgcaaagataagcaccttcggtccgagtgtgccttgcgcatttattctacagcaatactgcaatgccggggatttgcatgattacatctgtggctctgttcaaacctccaccactgcgcagcaattaaaggaccgccttcgccgtaaatctaaaggcgaaccggaccctcgaagcaaactcggaggggctcgtacacttcaactagacgagatatattccttcttccgtgatatcacctctggactccggtatcttcacgctaatggatacatccatcgtgacctaaaaccaaacaactgcctgctgcacgagaccggtgatggcatcagagttttagtcagtgatttcggtgaggtgcagtctcaaaatgcaatgcgcatgtctactggtgcaactggtactctttcatactgtgcacccgaagttcttcgtcaagaatatcctggcggaccattcggcaattttacgttcaagtccgatattttttccctcggaatgatactttactttctatgtttcgcggctcttccatacgcgaatgccgacctcattaacgaagaaaaagaggacttggatcagcttcgtgcagagatcaccagctgggctggatttgaccacgcacgcgccatccgctccgatctccccgaaaagctgtataagttcctagagcgcttgctctcggttgatcccagtcgacggccctcagctgacgaggtgttaaatggaatccaagtcggcgcaaattcaaatgagaacttccgcttcagaaaagccagctcgggaagctccgacctgcctggggcggctcggatccgcccattggatagccagcagccatctgtagagcgagcactttctcccaccaaaagtttgcaccgaaacccagcatctttccggggtgactcgatgtctgactctagtcattttcgaagcagtacggcgcctgtgtctgacaccaacgcagatggcccttctgctagcccagatcaagacatgatcatccggcatcgctactctacttcaccaacttcttctccagtccattctcctcatgaatcatcatcgcccctcgatccgcagccccagcctccgctccctcaacatcatctcctcccacctccaccgagtcgtttccccttccttaattacctgacatctttgaacccattgctatcctcgcctgtcttacaactcactctcttccttgtcaagatcatatcccttcttcatccatgttcaccgctggccgtcaacccctggatcctttaccctctccttctctctgcagcatttactttgagagcccgcagtatccaaactcagactcttgccgtctttttacacttactggtcgtcgggctgggtttccgtctaggcgccctatgtatctggcgcagaaactcggatattactttgtgagtactctaattggtatgccttgcatctattatttcctagcacttttaatgtacatctacatgacactcccccaacggtgcctctattatcgagtcgatgatgtattccatggaggcaagcagccctcaatgtattacttggtttttacacaatcagtttagtcttccatgaattgacttactagtctagggtctcagacccatcaatcatttccggcatcgactctccctgtagggcagttccgggctcagtggggaaatgtccctaaacatgcccgttgagcgagaagggatccacagcagataagcttcctcaaaacccggtgacctttaccgtgatgagcattagaagtaccgggcatcgcttgtagaatatgttggtctccgactctccggtgctcggtccattgctcgcagctaacttagttgcgacagaaactcttctactcttattgaatgtatgtgcctgtgggtttgtctgggacacattctcctctgccgacaaatgattggattgtgtcgagatgcttcaatctacccctcaaggcacgttccccacatctccactggtctgttaatttacaatacagtaacttaccagacgttgcaaatagtacagcttcagcacgataatttgaaacggtgaagccagtaataaaacatcacatgacgaatgtttattaattctactcacgtggacgggccaatcgcccgttttagcggctgcgctgacaatagcgtagactgcgatttgccggctggaagcaaattgcccaatcatttggctacagaattccacggggcgactagggactttcgagcaattagatgccggaccccgacgttgatcagcttccctatttggtatagtgttgcggccgaggttgtcaactcaggtacaactctttcatcttcatatcgacgtagatggaagaggaaactgatcgtcatggcgattgtgcaagtatatgcttgtaaccaatccttgtaacgctgacagatgctagcgcttcactctcattttaaccgatatttgatcgagtctgttctcatcccccgtggttgcttgatttgatctcattgggagacgagtacttgaaacttgccatcgggtctctcggggaaaatatgcgagctccagttctaggctggacgctcgtgtacaagcattttagatgcaggcttgatttggtcggcgtgcatagcgcccacatgggttgaagacaagcaatttccatcatggcttgtatccaaatatcaaatataaaaggcgctccgttccactgctgttgaagacttctttcttgaacaacgacaacttcttattcttccagaagaatcgagctagacaatccgccaatatgcatgccagtgctcttgttggcctcttggccctcgccgccgccgcgactgctgctccctacaaatctagtagcgctcactcgagttcttccattgcgaatctgaagtcccacgttaagaatgttgtcgttctcgttatggagaaccgctctttggacaaccttcttggtggccaaaccattgccggtctggataaccccatccacaatggtcctttctgcaacccttacaacgtgaccgatccctcccagggacaccactgctcagaggccaaggactatgactccgtgactgatgatcctagccacgctgtcactggtaacaccatggagttcttcagccagtggactcctgacaacgccgccattgccgatggcaagttggttcccaacaacaagggtttcatccacgagcagattcacaaccatggtgctaccgccaacgagactgtcaaggctgtgctggccaagcaagtcatgaactactacaccgaggcccagactcccgttctgacctcgctggttaagaacttcctgaccttcaaccactggcactctgatatcgctggtgtaagtggacactttgatatcactgtttcgagactattatactgatttcaatatagcctacctgccctaaccgattcgctgttgttgctggtacctccgctggccacggttccaacgatgccactttcggtacctatgccttcacccagcggtccatcttccagcagttgagtgagaccaatcacacctggctcaactactgggacaccgctggtggtaccggtcctgaggcccaatggttcgcctggaccaaggccaccagcaacgaggataagattgtttccatggagcagttctacaccgatgccgccaacggcgctctgcccgagttttcttacctgaacccctcctgctgcggtgttggtaccacctccatgcacgacagcggtctgatttccgatggcgaggctttcatcaagaaggtctacgaatctctccgtgccggcccccagtgggaggagactctcttcgtcctcaccttcgacgagagcggtggtttccacgaccacgttcctccccccctggccactcgcccggacaacctgacctacaccgagaaggctgccaacggcgaagagtacactcttgaattcaaccgtctgggtggtcgtatccccactctcctcatctctccctgggtcaacaagggctacgttgagcaaaagggtaccaactaccatggccagacccagtcctattcggctagttctctgctccgcactcttggttacctctggaacttcgaacctttcaccccccgtgttgaggatgctgcctcttttgagcacctgatccagagctctcctcgcaagaatgctcccaagacgctccctatcccccacgccttctcccgctagatgtgcaaatgaaagggccgcgaaaccggcggactgggtaacatagacttcatctaaactgatagtattcggaattcaatatacagatttactttatattgataagaaaccatagcatccatagctagttgaaaattatagtaggtgacagtaggacaaaagtcgagacatacgcattcactccaaattaagctatatacaggtgtgatgtcgagagagaataaataaaccacacctccatctatcatccccccagacagtcaatactcccgtagctgctctgaacctccccagaggagaagcacgagtatcatacgatttctctcctgttctggcagaattgtaggagtgcagccagagaagccctcttttcatcttggacttcagttagtgagcgataccatggtttcccatctctcgagcagataggggtatgcaccttaattttccttaagggtaaacccagaagaaattggaagcccgttggttagaggaaggaagaaggagaggaagagtgggagagggagtggattaggaagacaaacaaaacaaacaaacagtcgcatgcctgttttcaccaccacctctgttcaagctactataccaatatgagggagatatctataagagaccgttacaattattgttgataaatacatggatatataggtggattagagaagagaagcccccgacccctgcaaaactatcccattcgtgaagctttgaacttgctcacacgtttaggttgatcttcctcaggaggcaaagtatcctgttcctcgtcgtctttaggcgcgccgttgatgcgtctttgcatattgaagaactccgacgcgatctgcttctggtgaagctcctcgtcatagtgatccaattcaggagccactgcggcccctgtttttacctgtcgctcaaagaccttttcggctagagttcggtcatgtgggaattgaggcggagaaggtttctcgattacatcggagatcggtgcggagaagggtctgggctcttttggtctcgcggggaagagaacaggcggcaccgcggatggagttgtattggcttgtttgcgaaggcgggattcggtgacttgtacgggatttacggttgtagccccagtagtaacagacccattagcaggactagctggagcagcggcccgagcacttctgaaccgcgacgcctttttaggaacagtgggggtggctggagagggctccggggcccggttagtccgttcaacaatggaatcagcgagcacctgaggctcggcccgtacagcagaagttctctcggcgatggttgggggtgtgggaaccggtgcgatatcaaggtcatcagcgaatgcaacccgtttcttaggcttcttgttctctttgatggatgtttcaacctcagcaggtgtcgcgatctcgtgctgcacttcctcggggaacgtctcgatatccttgcccatgttcatcaggcctcgggcattgagcttggcctctaattccatcatctgctggtggtattctgccggaaggcgggtgtgagagcggccgtgttcgtcttcgttatcttcctcgtcgtagtcgtaatcgtattcctcatcaaaggagatgtcgcttccggactcatccatttccaactctgccacaatagcccccacctcgttgatcccataatcgagcatttcgcggcgaagtcttgcttcttccgcagattcattcacgtccgtcacaggcggctgcatgcgatcttcggcagtcacgacagactggggttgaaagaatttcaaagatgcgccgtttggctgaatgcttgtatcatcgccgcttgaggaatcgttctcatgaatttcagccttcgagctgaccggattacccaccacgctttcaagtgtagtatcgacaggagtttcagcagtcttttccggcccactcgtttccggaatatccttgacaccagccttcttcagcacatctagcaattccgaagcgtcattcccgggcgtgttgatcttgctcgagacgacgttcccatcctcatcaagctcttccataatctcctgcatcgggaactccacaccatcctgcagcagtggctggtcattcgagaccaaagcgtccagctcatattgggccttcaagagcctcttctccatagtcgcaacgttctgctgcacgtagtcgatgcgtcttccaagaagatcaaccacttgcccgcgagaccgcctcacaccttgcgaaccaagtattgtccgcatttccttctgatccaccagcgtgccgccaaattccagggccgcggcaaggaactcgtctgtaccagcatcatcttctaggttgctgatttcctcgcggagtccatcgtattccgcttcccaggttcgccagtggtaaagcgatttctgaagttggaggatgttttcttcgagcgcgaggcgctgctcctcaagagcatcgaggttagggttcagtactcccattgttgtgaaagctaaaactcagcggcagctttacaccgactatgtcaattggaacggagcaaagagaggggttgccggaggcaaaaagaaaaaaagtcgcaaaaaggtgacgagggtgtggtccgtgcgcatgggttgcttatcagcctcaacccagtcagtggtccgtctctcccacacgtcactttactttcaccatggccaccgatgcggcttctcgccgtgatgaagacggtaagatgatataaggcttcgtcgtgacggcataatgctaaccatatctttgcgcagaggtttgccctgtctgcaaatcgtcgcgatacctcaacccggacatgcgctttctcatcaacccggaatgctaccacaagatgtgcgagtcatgcgtggaccgcattttttcatccggtcccgcaaactgtccggtagccgggtgtcgcaagacgctgcgtaaaaatcggttccgcaagcagacattcgaagatatcggggtggaaagagaagtagatatccggcggcgagtcatgcacatgtacgtgtcttaccaaacaccccgacgtaccgtgtaatatgggagggctaacaattcacctcgatcagcctgaaccgtcgcgaagaagaatttgactcaaaacgcgcatatgacgacttcctcgaacaaagagaggacataatcgcgaacctagtaagccgcatcgacgtggcgaaaaccgaagcccagctccaaaaatacgcagcagataacatgcaatcaatccgcacaaaccaagccatcgaagccgaggaagcttcctcattccaagcccgcatgaccctcgaacaagaagaagcccgattgcgccggcaagcggtacgccaggaatacgagaccgagcggcgcgagattcaagccggtcgcgaggatttcctctcaagactcgcctccggctcatcgacagatgccgcggccatcgcgcgcgaaggacacaaggtgctgctcaagaagtcgtccgcgcgccgcagcgaggaggaacgcattcgacagaagcaggctgcgctgcggtcggagaccaagcgcgggtcgactctttccacagtcgatcatggtggtgcagcggatacgggtcttgtcaaaggtctgcgcaagatcaagacgcccgagccggagaagccgtacgatccctttatgggctatgtgcccgacaagcgcgattattacacgctccagtcgtattatccgtcgcagtatcttgatcctattcgaaatgatgcgcggatgctggctggtggttatgatttgcgtgaatactactcgcgcacactgcttgaggcttttgctgggttgagctgctttgttggggaggagatctctcagcgagatgctgctaatattacgaagtcgacggctacagagggtgctgctattgccgcggagaatgagaacactgcctgaatgctatttcgacttaggctttggggcttgcatgtatttgtattgttttgtgggctattgagcatagcgatggcgtttttttatttttgttcgcttggggtattacggccactgcatatctaaagaggttcaaaacaagtaaacggtctgaaaagagacctgcgctaaattgaacaagggatggaagaagttatttccaaggccgcggtacaaccgcaatgacatttaagtaccaagaactggctacttaaccaacaatcgattacccaaatcaaagaattaaacatacagatggaatcatactccatgaaacagcgccaaagaagcaaaaagtaaccagaaataatatcaacaaacgcaatgcgatgcaataatcagctcagaccacgcagagaaaggtggcctgtcatctcagtagtgctctcaatgccctcccaaggcaaatcctcttcatcatccaggtcgatctggccgtgacgagaagacttatcggtagtaccagtgacatcaggtgcatgggacataccgacgtcaattccaattgactcaagagtcgcttccatttcgtgctcggtcatctcacgaccgtcttgcttttggccctccaaaacatcgtagagagcgtagatttggtcggacttcatatcgatgtccttgaaaattttatctatcttttcttgcagggccttgcgcgggcgcttgccaagggatgcgtcaagcttgttgtaggcgctttgatatgtggctagttgcatcttcaggtgagaaagctcgtcttctaggcccttgagaacagtagcaagagcgagggcaggggcttgcgaggggcgcattgtgggatcttcgttccagacggatggcttgggcatacgctctgacacaggaatgggtttgacgatcttcacagactcgtgactgcaggtgccgtcagtggagtgacaattgcaaactgtgcagttctgtccgttgtgtcgagcaatgctatccaatgctttctgggtggcttgtggtagcttagataggtcagccgctgccaagtcgatgtgctgaagggtgatatcaggaaggatgaaagcggaggtcatgtcagtgacattacgctgcttcttgcgctgggaagttgtaggcaacgaattatctgaatggcgccgggaacgctctgcagtaggtactgtgagactactgtctccatcggcattttccttcgaggcggtggtaatatctccagtagcagaggctgggcgagggatttctgctttggactcgcgaagagatgacttgcgaggggcaggggttttcaaaatgctctgtctagtcgaattgacagtctctgtaggattggattccttaggggcactcgaacgtcgttgcttgcgcatcattctttcttcttctagtgtcttgcgtagacgagagatttcatgttcatcaataacactcaacagagtaacgtctgtttcagatgacgcccttgtctgctcggacacctcgggtccagtcacatcttcaactaccactcgcttcacgcgctgtttgctcgtattgggttgtttccgggagctctttgattcagaagagcgagacacatactttgatggcttagaagttgatgtacgccttgattgaggcacctcaatagagaagagagcctcatcggcacgttccttttcaagtcgagaaaattccctgtccacttgagtagacactttggagcgggagtcatcctggcgtctggtccttgtggtggagcggttgctttttgaggtaatgtctctggtgctccgactagcgtctccactgcgctcagtgtaaagttggctgtcgtcggcatcctcagacacggctgaactagcgtcggattcgacggtgtcctgttcacgagccttgcggcccctaagtcggctgatctgggacttgagatccgcattttcctgtcgcaattcatcattctcggccttcagctctcgagtttcgagataagcggccccaagttgtgagatagccgactctctatcatgattcaagcgcttgatggcagactcttggacctgggcctttcggtcggcaatgtccaactggttttgtaaagcgagattggctgcgtctaacttttggttctcgttttccaagcgcttggatccctttttgtgcgcattatcgtctggttcgtattttgccgatgactggcgtggtctgttcgccttcaaagaagaattttcctggcggtagctgtccaatcttctctctgcctccgacttgaacatctccagttctgcgaccttatcctgaagtagtctcagatggacaaacaaggccttctcatcttcggggacgggcactgcatccagcggcatatgctcgtgggggagagacacgtctgtatgatcatgaagtggggaaacaaatcgggtcgagcgcatcttgctctgtcgggagtaaaccggtgtgccatcttcgtacacaccggagacgagttcagagatgttagggaggtcgggaagaaggaatgattggtgggtcatggtatcaccgatagtgttggtgttggctgcattggcactgcttttgcgaggagtttccgcggcgttggaagccgatttgcgaacttccttcgcgtaggcgtcccgcgaagctcgctcgattgcgtctgcaatctcctgtgaggtgtttgcgtttccaaaacgcgtcgaacgcgccttcgtcgcaataggggctggtcgttcgtctcccaaaaatgaaccctcgtagctgtcgcgcacttttgcatgcatgtcagagaatgtcctccgctggtcacgttgagccttcgacacttgcgggctcatggtttcttgttgcgcttgcgtcgctcgtcgcacctgagcgttctttcgtaggttttcactgactgcgcgacgcgacggacgcgtggccgcaactggcttttgtggtgttgggtattcaacgcgcattgcgggcgaagatgagcgtacactattctcgaagctcatcatggagctgcgcgagtcgtcgcgcggtggtttggcagcaccgcgtcccacctcaacggacatgtccaaatcgctatgcaaaaaatcgtcgtccaactcgtgttcctcctcctcggaggtctgtatttgcgaaaattcggggaaagcacggtctagtgttgatgtgttgatattgtagtcaagctcctcgtcaacacgtcgtgttgaggtacccattatttcgtccaagtttgtgagcgaaaatgaatcgtcatgtaagccagaatttctgtgcattggaggcattctaagagtaaaagggagaagttgaagatcggaggtggtttgttttggagcaaagtcggaatgtttgggtcgggcgcgtctcggcaaccccggggattctgattggttcaaggcccccacggccgaactacagaatcgaattgttcgacttctttatttggcgttctacttggatgtagatgattgatatttactatatttgcttgaatgatactgtatgggcagtgttggggtctcttagtagatacaaactttgggtgttagatacgtatgatactccttacacttcgaaacagaccccttctatatttatgtagtctcttaatgactgtgatagctctctagatatagttctatctatcatacacagatggattgagccttcaccggcaaacagaacaaatctagtttatatcgagcacgaaaaaggtttccccatattcccatcctggaatttcctgatctgtttacctaaattagcaagatggaatggagacggatttcacggaactcaccaattcgaagatgcttgcataaactccacctccgaggactgcgattccgattaggaaacagaccagattgcacacagcatgccagacatttttccggtcatgccaattcccgtctttcagaagtaaaagccacatcacaggagggaaatagaaagacatcccggagacgagcagagccgcactgatagccatgagctcggaaaagaaggggatactttcggcaactatccaagcgatcagggtgacggcaaccacgagcgccagccaggtgacccatcccttcaccgtgttgacgtattgaaccaccgaatcgcgataaatccgcgtatggatgaaccgacatacgaccgttgtattgatagagccagaaatgaagatcacggggagggcgattccaaacgcgattttggacatcacaggccccgcggacagcagagctggggattgaacatcctgtccgacaaatgcatagatgatagacccggtgagcacatagattgagatttcgatgacgccgagtgcagttatcgatttgacatagtctttcggcgtatgcatttcgttcatgaatgacggcaaagcaccagcaaaggcgtaggcaaagacgatgttgctgatagcaaccgctgctttagggaacgtgacatcctcggcaggccagtaagaccagtctgaactcgctaatccaccgggcatctgagcctgttggattccagtgccgaccatggtgactccgattgccagaatgatagaaacgaagtcaacatagcctaggattgcaacatcggcgaatgttggcggtatcgccaataagagtagaatgacagcggagatcccaccaaatactagagcgcaaattgtactctcagtaatatttgcaaaggcgatcatgcccgtaaggcagtgggatccaacagagagtgtcagttgaaagacgaatattacactgaacagccagtagccaaagctccccatcatcagctgcccaatgtctccatagtgggcaaccgaagggaattttatcttgacagctccgatgatgtaactggtataaatggcaacaattcccatgccaacgcatatgactataccggggatcatccctagaacggcaaatgcctgagggagactcagtgcgccgagagcgatcgcttcgacgatgctgaccacagtgagacgcttccacccgagccgatggaagttagcatgtccctcgatcaccctttggtcctcgaacccagcatcaccgtcatttgataacaacttggtgttttcatcggcttgtggttgtgggctggcacagcccatcacgggcgaaggaccgttatcgccggggtggaaagagccgtaacccctctcgtcggccattgagaatactcaggggatgctgaagatggtatcctgaggtgtaaagtagagaaagaagagccaaatacggctacggggacatataaacacgcttatctggttttcttgctaaaaatgcaccgagcgctctcatgcggggatgtcataatcccggctggatattccgaatgttttgactcataaactcatccgttgaccactcggatggcatataattctcactataacagcatacactatttacctcaagctttgtgcaacgtactttacctgctgtttttctgctcttactcaagtaaaggcgttgattcatgactggaatgttgcttatctccgattgaagtattttccgcgcgctatgcgccataattgcttcaaagacgtctcgtgtcgtctctgctgtcgtgtcgtctctgctgtcatgtcgatcgcctgattagggctctcaaatagaaacaccgaggttcactgcacaacataatgatttcttccaaccttaaaggttgcattcaccgacagcgatagagtcggtgatagagtcggccgctcgactgttatcagacatcggcgctatcagccgacaccggccttatctggccccactaggccctaagcagtaaaacaagtttctccacattactgataagcagatagtaccatgtatgttattctagaagacatgtaagctaaggtaagctctttgatttttatattgctatcttggtactctccgtatattcgaggagcgtcagcaatggccaagttcgatttgatcatcgttaatggcaaggttgtcacggccagcgatatcaggtaaggtatcggatttagggagtactaccagaaatttaacaaggtttctagtatttgctgcattggaataaagaatggaaagatccgagctctggttgatgggttcacggacgaggagatagagggagtcaaggtgatagatgcacagtgagtaacttctacgcaaaagctgtgaggtttctaacactatgaaatcagcggtgcgtatgttatgcccggcggcatcgatgcacatgttcatctatgccaggatttgaagacaggacctcatggcctgggcggagaatgcgccgacaactttgaaaccggctctagaagtgcagtggcgggaggaaccacgactatgattacctttgcaactcaaacgcgggcagaagaagaccgcagtctgctaaatgtagtcaaggcatataattcccgggctgaagccacgggtagctatgccgactacggctttcacattatcattgttcgaaacgatgctgatgtattggagaacgagctgccagtcttgatgaaagactggggtatttctagctgcaaactattcttgacttacgagacccagaaattgacggactcgcagcttttggatgtcatgtttgctgcgaggaagaattttattaccaccgtgagtggcttatacaaatgcgcgaatgggagttttaacgtttgatagatgattcatgctgagaacggggatatgattcagtggcttacaagtaagttcatgagcttactttctcgttcgaaatttaacatcaacctagacaaactcgaaagcaaaggaatggtcggtatgttttaccctgagcttgtcatttaccaaattcctctaacagcctcaagccccgtactaccacgccttatcccgtccgcccttggtcgaagcggaagccaccaatcgagctattgccctcgctcacttgatccagaacccaattctattcgtgcatgttggatccgcagtcagtttctagcggcaatgaaattatctatttgggtactgattttgatagcttggcgcggccaatgtgcgtaaggcacaaaccatggggctccccatttacgctgaaacttgcccacagtacttccacctaacctgggacgacttggtaagttctctctatatattgcgtttggaatgatcaggctaatcgctaatatagaaacgcttccattcccccacgtgctttgagaacagcaagatgatctgctcaccaccaccacctccagatatatcagaccaggaagatttattcacgtgagtatcacctacacttccagaaccaaaaagctaacaatgccagtggccttcaaaatggtactttcaccatttattcttcagatcactgtcctttccgttatgatcatccgaacggaaagccatccggcgtccttgagcatgagccgagcatggagggagagaaacactgtcacggagatgagctccagaatctcttggagcggaaagaaggtacttttcgattaatacctaatggtattcctggggtagagactcgattgccgttgttatatactggggctctggcaaccggtcggattacggctcagaagtttgttgagctcacgtcaacgaatcccgctaaattggtatggatcctcacctttatataaggatgctctagactgactcttcaagtatggtctatatcccaccaaggggaccattatgcctggatctgacgcggatttggtaattgtacggtccctccagatatgtcaagcttttcaagcctcgctaatcatgtgcaaatagtggcatcctgacaaagattttgtgcctttccgcttgactaattcgatgctacaccacaacgttgattgtaagtacctggtccctaatcttggttccgtttactaacgcatctggtcccaagatacaccttacgaaggcatggagtttgtcaattggcccaagtacactattttgcgtggcaatattgtgtgggctgatggtgaagtgcaagggaagccaggagatggcaagtatttaaagcgtggtccaagccagctgagccggtctttctccaagacgagtgcagatccacgttatgtcgcttcttggctctacgattagtccgggcctgttcaatttcatgtattgcagactgcaaagttttatgtatatattctatttgacaatccggacgaggagacaatctaaatgggtcatagggggccatgtcttatctaggcatattcaaagagtagattgaaaaaaggatagagaagagatctagaatgacctatatataaaggacgagaaagatgttcaaaggatgatgtgggcaagaaggcctagctgctttatctcttcggtctagaagtacctttgaatcaaccaagttacactctgaataaagtttgctactagtacggctcgggagataattttagaagaatcaattctaagaatcaaaggtttacggcaatgtcaattgtcaaactaatataaagtctcagatagtacacttgaatcccaaattccctgtctgtcaaacctaactaatcaaaaacagacagtctaattaaatcccaaaatgtccctgtcaaatcaaagtaatcaaaagcagacagtctacctaaataacaaaatcttcttgtctgtcatatccaactaatcaaaaatctcaggtagtatatttgaatcccacattcgccttgtccgtcatatccaaccagtcatggtcggcagccatgtggttttcaattgcctccgcacgcctcttgttgctgaaatggcagactagtccataagctgtaatagcgaacattgctacgatatagcagacaatcatggctatggttccaccggtatactccggggcttgatcggcacggaatgtttgaggtccgatgatatttccggtagcccaagcgatatagaaccaggcgtatagggtaatcctaaaatgcgttagatcagggacttatcttttgagagctgtaaggtcttacttctttgtgtggccggcaacattggcctgatagaccgaaaccagggtgatgtaaggggcccagtatgtgcttgaagagggttagcaaaatgtaacgcattcggaagtttattataacgtactataagatgctgcacagaattaaagtcagtaagagtagatagaaaaaggtcttggagggaacttactataggccaacgagctgtccggcgaggttggttcgcggtaacgcataacacaagatagcaccaagaagcggcagaagaatggagactgccacaataggcgtgcgatattttctggtggtagcggcaatataggataggccaattccagacagggtgctcatggctccaggaggcatagcaaggagtgaggtctgaagaggatcaaagccaaggccggagataatgagggtgttgaatgtggtcagcccaccattgggtacctgcaaagcaacaatggcgatccagatcaaccaagtcttgatgtcgaagatagcctcccagacctgttcaaccttgaaagtcttagactcgacaccggtgttatcggctgccttgcgctgaataacgatgtacttttcccggggggttaggaacttggcttcaagtgggttgtttggcctgtaaagttccatcagttccgctcgacattaatttggatagaatggtggcatacagcacgaagtacaccacaactgatgtaacgatggtgagcgctccgacgagaaggaagataatcttccatgtttcgaatgatccagggtaatatccaacgacccaggcgaggaagccgttgatgatcggagcgaccacgttaagaatgatactgcatcactggtcaatttatgcttctacaccataggatggtgtgctggtacctgtttctctttggttgttcctcaggccgataccacatggaaacaaccaatgtgaccgctggaattaggagtgattcgcagccacccaggagaaatctgcagacgaacaagcctccaaaactggtgcatgccgccatacacatttcgagaacgccccagcagagaacattgaaggcgaagaagggaacagcagggaccctaagtcagtcagatattgagttcgaattaagcttctcgtgaaagtatgatagatatcttacttttgcaagcagaaggccaagggtcccatgaatgccagtccaccgaagaatggcgcagatccaacccatgaataatcatttccggtaaggttgagatctttcttgatgttataaatagcagctgccgagatagcagtcttgtcaaggcccgatagagtggcgcaaacaaatagctattctatgttagtttttgaagagattcaagaccacacagggctggggcttctcacagtcgggataagtctccaatcaattctgcgcatcagtttcttttcctcttcaacagaccaagattcaccatccatttgatcggcatagtcgctgataatttgggcggcgatgtcgacatccttgtttcttccagccttgattgctttaacggctgcgtctgctgcaacctcgccgcctttgggttcatcactgacggtaacttgatcaacagctatcgtagagttgcagtatcgttcaattgggtatttggctttgattcaatcaggtgggatcttagggttactcacagcccgaccttatatatgcaatgcccatctcgcactataatcttttggtcggaggttattcctcgggcttatcgataggcttatcggctccgatcgtcttggcttccaaggttcaacgcgcgatctcggccaaccttgggaccttcaagccatggaacgcccgaagccacctgactagtcggtgggtccccttatcaacccccgacgataacgaagtggagtggccacgtgaatgaggctgatttttagttggccgcgcgggcaaatcgatccaccgacggccaactacacgataatgtggtcaggccatccactctaaacgcggaatgcgtgggcttgggtgcacgctagctgttttaaaatactcgcgagggtatatctataaatgaagccactcatgaaatcgaacatcctcagaggttttcattgaatcatccaaaaccaaatcgttcaaaatggtatccgaaacagtcgaagagaaggggcctctttaccccgattatctccgtgagtaacatgtccaagagtaggagtctaagcaggattaacaagatccatagcattttatgaccccctcgaaaaggtcgagatggtcgggccattcgagcacgacgaccctggtcatcgagccgatccatcattcccgaatctcttgaaaaaggcgaccaatgttgtccaattgagccctcactgtggaacagagcttaatggtgtccagattgtgagaatatacgctatcattatatcgatcggccgagctaatacaatcgcgaacttagtcggagctttcaaccgagggcttagacgaactcgcgctcatggtggcagaccgaggatgtctagtattccgggaccagaccttcacggatctgggattcgaggagcagaagagaattgcctcgtgagtcaatcttaatcaagtcaggaaccctttcttacggtttacagtcactttggccctctccacaagcatggatggatgcctcatcccaaaaatggcccggaggaatttgtcattgtttatgactctaaagagtaagaatctcttttagtttatcatcttttcgcttgatctcacaactcaatagtgacctgcgcattcgcaaatcttgggctagaaaaagcccaatccagttccatgttgatcaggtaagatccacagcgtaaattcaatgattacagggactaaaagatcttttcaaacagtcccccgagactcagcctccgggtgcgacattcttctgcatgctcgagtctcctcccggcgcgggcggagatactatcatttctaacgtgagtctcatctatgaaataaaccaatcccaggaaactaacaaatatttacacagatgacacgcgcatatgaacgcctttcaccctcgttccgcaagcgtctcgagggtctcaaggcagttcacacaaccgcgaaccctatcatgcgcgagattcgcgacaacggccccgattccgtcctccgtcgaccaattactcgaaccatccacccagtcgtaatcatccaccctgtcaccaaaaagaaggcactctttgtcaactcctcctatacccaaagtattgtgggctgggacgaggaagagtcggactacatgctgaagttcttgttcgaccacatcaaccgtggacatgatttctgctgtcgtgtgcgctatgaacctggcacggtggtgatttgggatcagagagtcacgcagcattcgcagactctggattatcaggcgggttctcgccgccatgctttccgcttgactcctttggctaatgtaccgattccgagtttgattgaggaggatgatggggagtgtgcgaaagatgaaggccgcatgatgctgaatctctgctagtttgattaatgtttgtgtacagatcgcgtgccttgttgccttgttagtcagtttacctagctagttagttgtttgtagaaatctactctcctctctctgctttaacaggttatcggccctctatatccttgtctttgtcaattccaccaactttctatcagattcaacaatctgcatactctcaagtggtggctgcatcttgtaggatacaattttgcaggctaggatttcagctcgaaggggtatgctgagacagatattaagttattaactagctagcttcctgtttgttcgtagagaatcaatgcttctcctctctgctcctttaacagttttgattataaattttatacattatgttacattgcccatcaatgtttccaccttgataaatccgagattcgttaggcccttgacacctgccgctccatttgccgaaatacgtgttgcccagcgccatctccgaatccagctttggagctcggcgtattctttttcgaatgaatactttgcaagctcgaacgtggctggaatttcagctcgattggatggtgtgacgatttgtaaaagatgcaccatgaatgaaccagcaatagcaaaattgggtcgactccctacctcattggttagggcaaagacttttgtaagggatatatggtatactcacaactatgccagaacgaattccactgagctcccgtgagcttctcgacaaattcgacaaattccttcacacataataatgctcccttgacaaccgctttagccccttcgtatgtcgcatctggctcttctttgtttcgttggattattgtcggccatcgatccaacggccgtagcaatgcgcgtaggagggcgacgtgggtaacaatgtaggagaggtagagggacccgtttccatcgaggtccccaccggaattcgctgcgttagacgttgatttcaggttacttggcaaattctcacgccaatccttgagcttcacacgcattggtcgtgcaagatccaaggaatattggagatcattagaggtctttccgatcgccttcaccgaatagaatgacctctggatatcccacagaattgttgttaatgttgaaagatgatacatgtgactctttgtgtccggcgagtcagacaaggtatcttgaatgtcttcttgctggagcagggatacatcgtgatcatcatcacctaaatgactgggcattcctcgcgcaagagcgacccatttctccatgatgtagagtccccaccagagtcgacgacgaagccttttctcccagggtggaatggacatccatgactctgggtctcggtgaagcccaatagtctgtgcaactgccagagaagttgacgaaagcgtccatgcaaacgcggtgtcggaaagatacatgttggtaggaagtcgctgttgaaggagaagacaggcttggagagtggcgagggaaggagcgtgaagttcctgcgataagcaaagccaacacagacgatacaattgctcactggatggcgggtttaacagcaatgtgtagagactgtcgtcatacataacgaacggaagggcagtggcgcatattgctgtcaataatgccaaaggcattctaactaactcgcccggcgatgatgggatctggtggctcgacaaaattggaaaataagggtcaacatatcgagagtataatttgatgagatgccacgctgcagtgggatccatcatagcccatagacgaggccacgcattgtccgtaagctgcggatctagctttggctccgccttctccagaagagaatgatctgtgatcccaaagacagtagggtgtgagagctcgaatggctttccctctttttggtgtgcattatccatgattcgatacttcaagccattcactttcggtaacgacacattctggccatcgtaggcttggtggctcaggatatgaatatcggaaacccccgtcgggccaatatagaagctaaacgcccctggaataaattcaagggaatccacctgagaaggcgaatctcggaacgccggtcgttctcgactaggtggagacatttccgggctggatgagatgctgcctcgagaaccgacccccgccgttccatatcgactgactggtgaatcacttctttgcggacttattgattctgcctgccgagtctcttctggtgtaaagccttcaacgtctttcccatcattcggtcgagtctcggtcaagagatgcagccatccgtcgggttgttcgcatgtctcgaatgtttccagttgctcgtataatctcgcccttttccgcggccccggaccctcctcaaatgtgcattcttgatctctgttggtgcatcggtgacacggcggtccatggggcatgtcgcaggccactttacgctttcgacaagcatcgcaaggccggcatttccgagatttgtacaggcgaccattcaggacaggagcagaaactgagtactccattatgaaagcaatcttagagaatatcagagaggaagaagaacctccggaacgttgagagaaacggagccttatcttcagcacagacgcgtgcttatcatggtcaagcggggacggtttccacactgcacggcagacgacttgggccactgagtattaaaccctcattggaaaatattgccaaacaaaaacttagtcatgtaccctcacataagtaagacatagttatatatatgctgtcaaaaggcggtgataagggcggtcagcggatattcactagtgagagttaagtccctgatggccggtttcgtcagctgtatgtcactaggactttggattgcggagaaattaatgttcttgtggcaagcaagggtcaccggatagcaaattggagaattaggtatcttttgtagggaaactacatgcaaaagatacataaacacaaaatagtcatacccttaatttccataaccctcgaactaattatggagaaggtggaaatacatttatagtgtatgaagtgttaattacttagtattagcatgcttgaagtaagagaatagttgaacctgtacgaagtacactatttatgaggtggtttttaaggtattccttctatattatatagaggcagatcgactggatcaggctttaatttgatctctatctttttaaatgtcatttttttgtgtgttcatgtaccttttgtatggagtttctatacaaaaaaacctaattctccaattcgccattcggtggggcctgccaacacccggtcatccatggatggccctctgggccctaagccgataccgaggcttttgtgatcgtctagtagtaaaacacggtgtcttatctcctcacagcgtggcctccagatccaatagtgctttcagatacggactcgatagaattgtatccgccactttgtcgtccatcggcaatagtggcaaccggggtttatcgccatacccaaattgtcgatgcaacaatttcttcatcccggcaatctgcgatgatgacatgagcataagaatcggaaaaactcccgggtgcttcacttactccgatcttcaatgctactccgtccgcgagagcaatcaggttttgcaactcagttgcctttttgctggacccgctgtcctgacagagatcccacagtttcacgcatgatttctggtcgcttgtcagtcgcttcttatttctttgttgtattattggggcttctcaccggtgctatattaggtaggccgctgatcgcacccgctgatccaaccgagatggatggtagcaagaagtcgataaagccatcgattgcccgaaagggagtagatgatgatcgagggaagtccttttggaaatcgaggctggagacctgggccatgattcgagtcaacttgccaacattagcgcatctgccgggctacgttagcgggaataatttatggaagatgtaaaatggtaaaaacacacgtcagtttcacaccgcagatattggcagacgacttgatgatctgcacaatcaagtcactgtccatatcaataccacccgaaacagcggggaagttgtatatgatgctacaaattgttagcaacatttttgtctgaagaccggggtaatacaaacactggcaacggtgatgcctctgcgatatccacgaagaaattcttgatcgaggtggtgtctgccaaaagagctccggcatagtatcctggtgggataaccatcacataatctgcgccagcatcggccgcatctttgcagagttgaatagactcgcgagtactagctccgccagcacccgcaacgatcggaacacccgtcaggttgatctcgtcaagggcaacgcgagcggaccggatgagctgcttcttctcttcgtggctctaaagataaatactctgttagcactgtagattttttttgccttaacggaagtctgttaccagatgaattgcttctcccatagacccagatatgactggaatggttccggcacttgcaatgactttcaaactggttagtgaatgttgtagttttgtggagtttcatgactatacatttcacatggctctggaaagctttggaatctggattccgaattagccaagctctcaagccagtctacctgatcagtctaaccaatttcctcatcatcaccgaagaagcacggcaaaggcgtatagattcctgtaggtaaaggccgcatcttgggtgttattgtttgtggcaaagtattaatcgagaagcagatggtcaagtgtaaagttttgttagcactcttctgcggattctcttttgatttgacttcggaatccagccgataaagatacagccaagataggacttccaaggttgggcgagatcttaggcgcggcagagctgcagggcgcgcaaccttatcgatagcgttatctccatgcccacgaggccacgggtgtatgcggggacccgtgggccgtccatggatcaccgtttcttgaagaatcgcctccaaagccggggctgtagggcgtgcagcttatcgttagcgttatctatgtacatacatagatccatagattcctgtagacacatccatgatgcttgtatgcctgtggggatctcgggaccgtcactcgtgcctccacggcctccacggttctcccgaggccctgcaggcggcgcgcattttatcgatagcgttatctatgcggggaccgtcgcccgtggatatgctctccttgtaatctgagacctcatttctgagcatatcttgccgtgatattgcctatcatgtggcatcgcttgccccaagcttttagtaacataggctgctagtgacacgcagaagggctggccgaagcggcaaaagaggatagtgaataatcacatgtttaatcttttttttttctgcccttatctctccactcacacatctttgactatctacacgcccgtttaagctgcctcgggtgaggcgcttcttggccagaatctttcgcttactacaatagtctattcagttccaaggttgtatctatagattcatccacttttctaatagcgtagagatctgcctaaaattctccaattaatcttagtccttagtatgttgtatcgaaagcatattttgtattgtataactccgatatcttctataactatcatgcaacttccaagtttgctgattgatagtgtgcttgttagttaattagaggcagttaataaccatcggggagctctactatatatgaaatcgaattaagacccctcggtggagatgggtaggtcctataggtctaacgtagaaggttgtagtcaacgaaaatgctggcgtcttactcgaggtaatttaaacagttgtgtagatatagtggaaagtagacttgaaggcttttgtatcaatatattgtattcattcgctggtctttgtttccaggatcagtctatgtaactcttgcaatttccgactatgttcatctttcagcgatggtatctcgggaacgttcaacatgaagccgaacaaaaagcaaaatacttgttcccaaatctattatctactccccctaaagtacaaatcggaacaacgggctatcttcacccatctctcccagctgttcgggagtataggtccgctcaatttcatcaacatccagaccatcccgtcgcttgttttccttgcgcatcaaaaaccagtgcacagtagcaggaatcatggctccgagtacagtcgcgccaacggagaatccaaatcctagaggatagacaggtgccttcgagatgttagccaaatcctggaattcgaggtttcttcggccaactgacctcgctagagatgtaaatattagatccaatactaccaccgcccacactgccgaacagcatcagaagaccgatggcagcggcccgcttggatggattggtgatgttggagcttgtccatgcgccaacctgttcaaattatcagccaagatcccaatgccgtagttagaaggatagcactgacgattggagcttgcgccgagtatccagccgcagccaagaagattgcaaagtagctcacaccgggaatggaaggatggtgcacggtaatccacaggatgataataccactagatcgttctgtttagctcgagcttccacctttttgaagatcagcttacatcaggccaagagaatatgcgcccatgatacagaagtaccgccgctgctttagatcgctgatgtacccaacagcaacacaaacacacgtggcaaaaatgtaaggaggcgtggtcataacctgggctctcactgcagtatatcccaggtttttgaccatcgtgggcagagtgtaagacagggagtatgtaggcacggagccaccccaccaaaacaacatcatcatgaagtaagttttccggtcttttgcggctgaaagcacatcactccagcggaattcataagtggaagtcaccgggccgttagcatacttgacgcgaagagaagcatattcaagttcctcgtcagtgagccatttggtacctttgccagctcgatattgatgaggaaaggcgctgttcatggtcagttagcttgtttacttaagaaagatattattcggagatctcacggcaagcaaaccagacaagcaaggccggcaaagatggtgatacacccttcaataaggaatagccacctccaagctctccaaccgtgatgtccatccaggtatccgacaccgtaggcaataacaccgccaaaggcaccggcggttgtattcgcaccgtagaaaatagccatgcgcgtaccgatctccttgggcgtgtaccacatggatagaatgaaataagctcctggataaagtccagcctcggtgattcctagcatgagacgaataacgataaagctgccataggagtgcgcttgtgaggtgagagttgtgatgagtccccatgcacatacaatgaatgggaaccatatcttaggacctactcttcgaagcatgatgtttgataccggttcgaagaggccataggtgaagaagaagtacatcaaggctagattgtactgtgtaccattcatgccgatgtcctcaaggaggccgaacagctaatcgcgagagtaattagacttaaatatgtcatggacattgaaggtaatgcatacctttgcatttcccgcattggacttgtcgagtgagcacatcaggtatagaaaactcagtgttggaagtaggcgtgcatccactgaagtcaagcaagtgagcgtctggactgtttcatcatttcaaaaagtcttacacttcctgatgagcttcttctttgcgggtccgttgaacacattgtccaggtgaagaaagcgctcgtattccagcgccgaatttccatctgtcacagtcacgacctcgcccttccgctctgtatcggtcagggaagatggcggcgaaaagtcggtcgatttctccatggtgagatgtcagagtgttgttttcgccccaatgtttgaaaaaaatatcctgatgaagagcggtcttaaaaggtattttggcatttgctggtttatctctgtctagagcttggtatctctcggattgcgagtagttggctggatttggtagcacaaagatcgcggggttcatcctatcagagctataccatttgaagcacactgtcgctatagcaaagcgaataagatttccaattgataggcctgtcgttggcctctccttggcctctccttggccgcgctgggacgataccgctgataagggcgccgtgcagctttatcgcacctcggaagcttcgccgagcggccaaccgtatcagcgtgataattagatgttggaaggcgaaatagatgcatgtaagttttttttttcaacagcaactgagggcagctatatagacccaactaagctgagctgtcaaaacaagtcgcgtaccgattgtttaaagtcaacaaagtcaacaagcacaatgtctagcaccaccgttctcacaccaggaacgatcactcgagagaagaacgaaaatggcgaccctttgtatcctgactacatgcgtaagtctatatgataacaatattgaataagcccgtggatgagtgctaaactctatttctttcacagcattctatgatcctctcgagaaggtagaagacatcggttctttcgagcactttgatcctggccatcgtgccgatcccaagtttcccaatcttctgaaaaatgccaccaagatttgggagctttcgccgcatgtgggaactgaaatccacggagtccaactctctcaacttgacagtgctggcttggatgagctagctctcctcgctgcgcagaggggtgccttggtattccgcgatcaggatttcgtgaatattggcttcgaggcgcaaaagaagattgtgagccattttggtcctctgcatattcatggctgggcgcctcatcctgctgcgggatcagaggagcatatgattatctatgaccacaaagagtaaatataacctctcagtgtgaaatgaagttcactacagctgacactacagccagtgatctccgagtccgtcaatcctgggctggtcgaagcccagtccaatggcacacagaccagagtcctgagcaacagccccctggaaccactttcattgcgatgctcgagtcaccaaccactgcgggaggagacacgctcgtgagctctagtgtgagagcatacagcagtctctcgcctcgtttccgaaagcgccttgaaggccttgttgccgtccacaccaacaacgatggtgtcactcaagaaatgaagcatggccagcaagctgttatgcggcgcggcgtcctccgagctgaacaccccgttgtgctggttcatccggtgacgaagcagaaggctctttgtaagttttatccagaatttcgctctacgcgatcatgttatccctaataatgagtgccgctagatgtcaacccggtctacacgaagaaaatcgtcggatttgaccaggaagagtccgactgtattctcaaattccttttcgaccatatcgccaagcgacaagacttctcttgtcgaatccgctatgaagctggcacagttcttgtatgggatcagcgagtcaccaatcactcgcagacactcgactaccccgttggagaccgcagacatggattccgattgactcctctcgcgaacaaaccaattccagcaaaggttgaagaggatgatggagaatgttcaaaagatgaggctcgggtgcaattaagtctgtgttgattacagtattcaattctgcataattttggcaatctaaaagagataggctgggctgtacataggatctgcgcacagaactaaagaatctcagtctattccaaagcggggggggactgtatatacatcggcaatgccatcaaggtcggacgtgtctttctcttatcaattacaacgtcataattggagtatttcacctataatgatatcacaacataggcactgctaactatattttccctatatttactaattatcctaagatgagcaataactaaactctcatgagtacggagtaaatcagattctttgtactttctgtttttcgagaaatttttggtagaacttatttttcttctccaatgcccgtgccttttaaaccatctgggcactgaacgagtatagggaatgaaatctcatctgatagggacgaagatatgcaagctctgacacctttcttctgccggatgaaatggaggcggtggagccggggatgatcagcacacgtcaaattctttagtgtaaaaactaggtacctctagtgacataaaagtacatactgaaacatcgtagaccaaagtactgataagtatccagtcaccgctagggtacctactccaaacggcgggccacgtgtttcagcgtcacgcaagagcgaccaatgaacgcgaccagaacacccacgtccacaacgtccacaacgtccacaagcgctaacccaaatcctttggagttaggtcgatatttaaaaatggattgatgtccccccttcctcgcattctatatccttgcaggtttcacgtacttgcctggttatgatatcatctactcatactcagctaatgtgatggcagtgttctctgaataccatgatgaggagggcctgcttggagagaggcaatatcaagcctggaagcagggaggccggcagcgctcccgaaaatttactgcattgatcctcatgtttctgctgggcacttttgctctcgttgtatacttcgtgaatggaacccattgcaaccccccttcacgtgccacaggccagcgcgacctacctctggcctctccccttgacaagttgaagagatctgcctgcaatgctgtcgatggcggttatcaatacaactccgagctttcccacaagtggggccagtattccccctatttttctctttcggacgaatcggccatctcagacgaggtaccccatggttgtcaaattacctttgctcaagtgatctcccgtcatggtgctcgattcccatcggcgaaaaagagcaaggtatatgccgagctcattgaaaacatccaagcgaacgcgactgcctacaagggcaacacggcattcctccgctcgtacaaatacgtcatgggcgctgatgatttggtaccctttggagtgaagcagatggtgaaatcgggagccaggttctacgagcgctacgcgacgctggctaaggaagctgtgcccttcattcgcgcatctgactcggagcgggttgtggcttcaggagtgagctttatcaagggcttccagaaggcaaagtctcatgacaaaaatgccaaccaccggcaattaagcccgaagactaatgtcataatctcagaagagcctgggactaacaacactctgaaccacagcgaaatctgtcctacgttcgaagacactaaactgggggacgaggtcacagaaaaatacatggcaatctttgtgcctcccatccgagcccgtctcgaggctgatctccctggcattaaactcgaaaacatcgatgtggtcagtctgatggacgtttgtcctttcgagacagtgtcccagagtgacgatggagccaagctatctccattctgcgacctattcacccaagctgaatggaaccattacgactacctccagtcactaagcaagtactacggttttggcgcaggcaatccgctaggcccaactcaaggcgtcggtttcgtaaatgagctcatcgctagactcactcgcaccccagtggtggaccaaacaagcacaaatcatacgctcgacgcccccggtgctgcaacattccccctcaactacaccatgtacgcagacttcacgcatgacaacggaatgattccgttcttctttgccttgggactgtacaacggtactgctccactttctctcactcacctccagtcccctgaccaaacggacggattttcatccgcctggacggtgcctttcggtgcccgcgcttatatcgagatgatgcaatgtcaggacccggagcccctcgtgcgagtcctcgttaatgaccgtgttgttccgctgcatggctgcccggtggataaccttggccgttgccgccgtggtgatttcgtgaatgggcttacctttgcacaatacgggggtgaatggtcccagtgctatgaataaaggactctgaaaataattggtgcggcgttggttctcctttaacatgtgtttaacgataccctaagagtagcatccttactacatatccttattttggccagtgttaatgccatacacgttaccacgagatctgtgtcttggaaacaataagattgtacccaaatatataattgaggctctaacgcatgcaattcgtcaagaaagtgattcaaacagccctccaaccccaagaagcatcccaaatagtaaccagtacgttttaagcatctctgcatctctccttacctaccccaatgtgtccgaccattcccgttaacttcatgcggagcagaaagaacccaagcttcccacagaggcaactgctcacacaagacatgcacaccgtcatcccctagatccccactagacaaagaacgcagtctctcaattgaagtcctcaacggcaacgccctctcccccaccaaaacagggaggccatcacgcggcagcggggtagtaattggcgactgaggatccgacgaggtgccagccgcaaaactaagagaagacggcacaggaccaacatggtaatcatgaacctcgacaccgtttgagacagcagctgaatcaaagtgtgcggcgtaatcaatatccttcagaaccagccgctccagccgctccatttcctcgcgcaggacagctagcacatcgcgccacaagccaccaggccggaggtaaatgccgaggaggcggagatcgcgtagctgcgacctatggcgacgtgccagtgcgatgatctcgtctgcgctcaggcgccagccttggatgctgagtttgcggagggttttccagcgtatatggtggaagagtagctcgaggtcgagatctagtggtgccttgctgagaaagccgatatgaatggcgattaggttcttggctgcgacgaagaagcggtggaagacacctgagaggtcggccatggttgcggtgatgtcggttgtcgagtggaaggttatatcgaggcttgtgaggcgtccggccatggcggcgaggattgttgacggggcgcggaggagctggagggttgcctccgggctgatctggggccctgtgaagcggatggagctgcattttgagtcgaggagggcaatgctgaggtttgtgactgcgcgcgagcaggcggtttcccagtcgaagcggatatctgttgcagtgccggtgccagttcctagtgagcggtcgcgtatgaagtcgatgaggtattcgtccgcttcatcttgaagccttaggagctttatttcctgtaaggctgagaacgccgcaattgcacggcggaggcgggctaggtccttgttggtttcagtcaggttggtttgttcacgcagccggcggctgtgtaattgggatatttcgggattctctgaccccaaagcctgtagtgtctggacccattctgtattctgctcttagtcaatttgctcgcttgtggttgagagattgaagagctgataccgcttccttgataaaagggccgcaccatgtacgtgatggtcttcacatagtaggccagctgcatatctaccagctcatctaatcgccggaagccgtgatcagagaaacgtagagtaaatcgattgaacttgtaaggggtgccgattcgcatgaagcgcttgcagacgagtcgaaagtgatcaagatcggacacttcgttatattcatggtcactagacccgggagtatgtccatttccatgagatctgctgcttagggctcgaggtccgggttcgagaagaaaggacaagatctcgctcattagctcgtcagcgagatcatagatgtgacatggagtcatgatcggcgcgtgcagccgaagcatcgcctgcttgtttaagtggcagcaacatggaaagatggaggaattgagggaaagtcggcgcttcttaagctatccccaagaccgaagaggcgagtcacggagggaattgggaagaggaggggaaacgacaaataaaaataaaaacaaaacacatagctaatactcgactcgtcgctgttctcctgcagacactagtaggatagttgacttatctcaccgtgcatggcgagagctctcgccctaacgattgatttcgcgaccggggacgatcatcaagggcctggtttagcgccctctgcactgacaagccgggctttctgacccgatccgcttgatttcattggtgacgctgccacacaggaatcacatgattgattgactctgcggccagccagcgaacctgcaggaaaggcttttcaccaagagcgcgtagtgtcggggagggggccaatgtagaccccgccgggaagtcatcacatcatgcagggtgatgggccatgcgtgcgaattatgtgtctaccaagaatgattggaggttaatggccgaaatcacgatgaactaatgtgtgttcatgtgtccaggagattatctactagcgaccgaatcttccgtataattacgtgccgtgtgtatgcacctatcagaccttcgcaagatgggctcggcgccgtctgatatccgtgctgctgattttggactcgaagccctcgccatcagtggccgtggttgcctctccagactggagtacgtccacctcgaacacgtcaaggcttttccatcccttcttcacccgctcttcgttgacggctgcccctcccgagtgtgtctcctttgagacaacaattgccccaaggttctcctcggtaatcgtgggtccaaatggatcagagatttccacaaattcaaacgctaggttgggttggatccttacgaggacagtcttgccattgggacctggcgcaaaagcacgttcaatctgcggtgatttcttttcgggtgagaaatccataatggccgtcaggaaagctgcagtactctgccaacgctcctcccaactctcgagaaattcggcatactttttatttaccagcagtgcatccccggtcaccccgatggtcaagcggcccttctgcccccggtggagcggttccagggccaatgcaactgctgtgaggagaagcttgtgaccaacatgaaggtgatcaaatgtgccaccaacgaccacggaatagtgtggagtggatggatgttggttgtcaggaattaacaaagggtcagagatcgcccagtcaggcttgcttgtgatggcttgcatgcttgccgccgtgatctcccgatcctggctgccaacactgttggtgaaggaattagccaaagtttggccgacagtgttggatagatagaaaacatagttccaacggcgcctcgaatttgctagtgattggacgtccagaatgggcccaaagcgagagctatcggcctggatggccgaggtgttctcgcttgcatcgacaaataccacccgggtatcaatgccacctggagagtccaattcaattttgtgtgctgcacagacagcaccaaccagcgtatagacgctgctcaagtaatgttggagttgggcaaacactttggcccgaggttggcagctcggggaaagaagatctggaatggccagagcaatatcgagcacagctgtacgattggatccaatcaatgcatttgagagtttagtgtagacctccactaaagacggctggaaggcatctttgacttcggcaaaagaaaaagctggaggcgggggaagtagtagtaaagccgagggtgaattggtatggtcggaagccatggtgtgaagaatatatgactacagcaacgagcactggggttaacattcaaatccaagaaatggaaaatcaacaagaagcgagaaatcaaagaaatcacagaaccaaaaagaaccacagccctcaataagtgatccccatcacaggctccaggagggctggggtaccggctgagtcagctgttctcgtgggatggatgacaccgccctctgtcctcctacaactctccgatcgagatgaggatgccattgagagccaagtgacctgacaagctggaatgatatctggctgacacggtcgtctggttggagctccctcgaagccccgctatatcaccgatttggtgcatcccctaacctccttcactgatctcgatcgagaaacagtggagctcatcctccaactacgatccacaccatcccctgcatagacagcgctcttgctcttcagcatagaccgcatcatgtcaaatcccgcttcctacgacgcccaccggcggtcagctgtgttcagtcgccagccggaggagcttcacattccgtcaaccgggccaatcaatccaaactcgtcccgccaatcctcctcgcacgactatcccgccacgtcggacgcgggtgcccggcttccctcaattaacgtacaacagagctcccaatacggcggcgacgggaatatcagcagcagtgccctccccggagccttgcaaccagggaatcagaaccgcccggctgtagtatcaataaataccgctccatcggtcgtccctaccatgcagcagtcatcgtcgcaaaccaaccaccgagcgagcatgattaattcacacggacattcacgatctagcccggccggattcgaccaatccatgtataagcaacacactgcgcccgatggctcgaagtatccctcttcacctggggcatttccccctcacactcctcaaggctcgaagtactctccccttggtctggccgatatcaggccatccggtgaacacatgttgagcgaggcacttatgaaccccgggatgtcatcaatgtcttacaataacggagacaatcaggtgccaaccaacagcaattatgtggcaccatggcctatatacgcagtggattggtgcaaatggcccatcacgggcaattcgggctttggtggaaagctagccatgggaagctatttagaggacagtcacaactatgtatgtgcattcaccctatacatgaatatgttcgcgctaaacagttaacagattcaaatcctcgatacacactggacgcagccagatcccgacaccccagatgcggctgccggagagataaaactggattatgtgaaaacggccgaggcgacacattcttacccggttacccgcatcctctgggagccaccctcatctcagaagcaatcgactgatttgctggccacgtcaggagaccatcttcgcttatggtcactaccgaattcccagcctctccaaagctcgaactcgatcactcgtaccgcgaaccagcgagaccctgccacctccaagctttccccgctggctttgctgtctaactctaaatcccccgagcacactgctcccatcacctctcttgactggaatacaatttctccaagtctgatcattacgtcgagtattgacacaacctgcaccatttgggatattcccacattgacagcgaagacgcaactgattgctcacgacaaggaggtgtatgacgttcgcttctgcgccaacagcgtcgatgtttttgtaagctgtggtgctgatggcagtgtgcgaatgtttgatctgcggagccttgagcatagcacaatcatttacgagccgacggataagagcgagaagcgtaagtagtcttccaggttataattacgtgctctgaatattgacaatatcttcagcagtgatgagccccgggagctccagcccccctggccaatcgcagaccggcctctaccctccacctttgttgagaatcgcaggtatggacgacatgaccgcaacatggcatataatcacaagctaacacaatcccccagcatctccccatgatgcccatctcctggcgacattctcacaggactccagtgttgtccgtgttctcgatgtccgacaaccaggccaagccctattggaactgaagggccattcagctgccttgaactgcgtagagtggtctccaagccgtcgcggtatcctcgcatcaggtggcgacgatagcatggttctcctctgggacctcatcaatcaacacaatgctgcaccgatcgcctcccctccctccgtcaccccaggagcgccgccttccacaacctcggagcgcggccccgctggcgtctggcagagcgaatacgaagtgtccaacatcagctggtccccacaaggcgggcccaaccacaccggccagccacgggaatggctaggagtgtgcggcggacgaggactaacaggagtcgcgttatgagctatcatcaaaagaggtcttgatttccatatgtcgtctgttttcatccttggcgctttccgacaactatggctcttgcattagatggttcgatctctctgatatttgtttctgtttgccgcgatctattacctcgcgtgcgcacagcatcccctgttttgcttcgttctgtttgtgtgcttctctagtaccggtcggcttctctgtctgacccggtacgttttttgcataggtcgagtgagaacctggtgatcttcatgggctactcttggtctattgattggccatacttctgacttgcttggtacgagtgaatgaatgaatgaactatacattggatatgggccatttgctattggttgagaacggccttgggacacccattctacgtaaatcgttgtaatcatattaccccaagcttatagccctggtgggacaactaagatttatcatagtggtcaattccgctgtgaggatttgactgttcgaataaaaagcgcgtatagcttggggctctgtgaattcttcatttcactgcgtgtatgaacatctactttcatttccagttgaaacagtagcatggcgtgacgtgagtcttagttctgtcacgagtctaagtaacaggaggtggatcgaccaacggtcccatgcagtaaaaataaccaagacagctcgcccagcgagcaggtatcatatgcactacaagtgtacccagacagagaaagcaaccactaaacaatgacagtctaatatgaacaggtttatgctaagcagtctcactctgcgtgggtagccagggttgggcgaccgagcgttggacccttggaaacgagacgatcttcgagtgagcgcgcaaatttgacgctagggatgtccacggcacgccagaacacatcgcctagccagatggagacggggagacagatcagccagccaatgaggaagccgaggcagtattggaagttggtctctttgccagtaatattccagatgttgggcatgatggagtagcctagacaatggaggacggggccgtggacgacgtagaaggcaaatgagatatttcctaggtattgggagaagggattggtgaatagtttctggatgtcaggggagtggttgatagagaagacgatgagaacggctccgatggtctgagcgaagcggtgcggctctggataagtcttgggggtgacgtgccacagccagccgtagaaaggcgtccatttgaaaccaatgttgggacatgagccgaaatagagaccgacgacaaagagcgagatccataggccgcggcgagagaccctgatggcggttttgctaccgggactgaagcgaatagttgttttgtcgtcttctaccgccagccgtgcggatggctcccaggtcccgttgataagatccacttcggccatcagcatgccgaagagaaataaaacgagttcccaacgaccataacgcatgcagaaccaagtcaaaccagagactactgtcatgcgcacaggtgctaccaagcgtgatgtccccatgatgacgacaaataggataagcgaggagcggaattcgagaggaatcgtccaaaggtgcggattgtagtagttgtagtaaagcgcatagtcaaatgggttcatcaaggtcgccaatgtgacccacaagtcatcgctttgtttcgagaaggatttatacacacgtggatgttgctcgttagtgccgaggattgtgtgtccttccttgatgaccttatgggagtaattatacagcccgaggcgaaccgccacaaagacgcaaagaattccagcaattgcggggatatatagacgaattgctcggcggaaggttcctgatgcgagcacggtgaaagtttgatcgaaggacctgctccgaatggttttcagcggcttgtatgataaaacgtagccagagaggacaaagaagatggccaccatgatgtgaccagagatcagcatatggaaaaacggcaactggtgcatcccaaagttttccccgccaaatccccatcctatcgcgaccttccatgtgtatgtgaaaaggaaatggaagttgaagaccagcagacaggcccagccacgcagcccgtctagagctgcgatggagtggagcttcgcaggctggggtggcgagctgcctgagccgtccacccagtgttgtaggaaacttggcgtgagcgcaagtgtcaacctgtgccatgcgtcttcagaatatgccagccagtcttcttgcgacacctcgggatgcgcaaggatgttcgaggggtgaaactgtgacaagccattcccgcggggtgtgatcgtggagtcaggttccgaggaggcagattcgagatctttcaaagggatgtcggaggccgtcgtggcccgattttcgaggtaggatgccatattgttatgttttgcaggtcggtcggtcgcaactgggcattgccggtggggccaaaccctcaatacacacgccaaaaggcaaatgaaagcatttaggccggtatagggtattggggaattcggcaaaggggaattgggcagttcgcgcgtccagccagatgcgataaagccggtgatgcgggctgaggtcggcgaattcaggcaaatacgtcagcggaaggcctgctggttcaccgccactgaaaattgcgaaatatgagggagatggaattcaaggatagtctaagggagttgaagagttgaagagtcaaagtcaaagagtcaaggagatcaaagtaaagacaaggcagagaggcgccgatcgattgccgttttcgttaagccgcgttcagaacgagtttcgatataaaagcacttggtacggagtattcatatgagtgatcatatgagtgaggctatagttcgagatcaaattgcatgtgaattttgatctgcatatatgtctatggatatatcccggagacgtctgacgcgtcagtatcatgcagcagggtagtcaatagtcctacatatcctacttctcttcgttgaattgctgacggttcctatgtgacttcctaaattaatagtaaatagattatcaaatttttagtattcgagtccgcagaaaagtaactagaccgtttactcgtcaacatcaacatcatctgaatagccaacagggaactaatatcgacaattcaatatagaattagcaccccggaactaacgtccgatctaaaattcttagatatggcatgcactgagcctgtaccatcattaccaagctcagaagcagaagcagaatcagtatcagtatcagaatcgtcaaaaggtttgggctcgtctcctccttctccagtctccagcgaacttgggcagcttcttgatatcatacaccataacgagccaaatctcccgtagatcctcacgaacagaaatcatggtcttctattagcgatctgtcctccaaaggggccttgtaccatttgttaaggttgacatccatggatagtgtatagttcccaaaacagcttagcgtctgcttaactgcctcaggtgtctacgccaagacatcttgagatcacaaccgtggcctttttaccgtcagaggagactcaagaggttgaaagatatatatcacgtcaaagactgttagacacttgtatgaattatgtgattatcaaaggagaatggacattttccatgattcgctcgaccaagttctccgaatgcatcatatacttcccaggagctccgttttccacgggagcttcgctgaacattttcgagctcccaagcttccaacgtagaacttagacatctctgtgatcgatacaaattggcgcacagcatagaccattggaccttgatgtcgcaggttccctaaagcggcgacgatcctctcagctccctgattcgcgcgattccgcaattcaagaacttctcccttcctctttgtccatccacgcttattgtcccgccgccttctttctgcttcccgacatcttgcaatacaatctgaatgtcgcgatcgtctgtcgcgtgcatttcttgatcaaagtgctcgcgtggtcgaagtggtcccgaagtgggtgcagtcacgatggatttgcgcacgatcatgaacaccgacggcggcgcctccaatcctccacccccaagcaactcggccagttctcccatatccgatcaaaccccccaaaagcgcccgaggaaggctgcttcttactcagaatattctacacgtccgccccagcctcctccgttgcaacacccgcagcacgcttccccagagcgaagctcaccttacgcatccgttcaatcgccataccaacaattcagctcggcccctgtgattaatacagcggtgaggtctcagcggagtcagacacctccacacgtttcgacaccgtatggtcccggcacgcgtgatccatttggcgcgccggcatactggtcgcagccccaacaccccggtggtggtcctctggtttcgccatacacaccacagccgatgagtgcgggaccacaacacccagaacaaccgtcttattttgcccagcagcgttctcaacagcgttctcaatcactccaatcggtgatgacaacaccccgagctccaatcgaatctttccgcagccctcctgttgcatctcaacctcttccatcgcagcacttctctcccgccgcacaccgatctgttaccggcacccccttgggtcctcctgctgcctttgctgcccgtcaatctccgtcaactgcccgcccgccgtcctccggccacaattcccccggcaatcccctatccagcccgaggcccacacgggaggccccgatacgagatcaagttccaacgcaatcacctgtgactcagcgacagttctctccacacagttctcaaccgcccgagccgactcgcctcccttcaggcggctcaaagcaagagccaaccgagagcgccagtccccaatccatatcccgtcacaatagcatcgtcacggcctcggagtcagcgaccgctggtcaagttcgttcttccgaagaccgaatgctggttgagagtcctactgcacaaaagtccaccgtggcaggatcagatttcctaacctccccattggcaccgggcagtcaaatgaacagttcaccctccgctcacggaggcgcccatgccgtggacatggaaatcgaccacgaaccacgcgtcgatatacaacagcccaaacaaaaaagaaggaggtacaacgagcctccgatctatgctcggctgactccccgcaacacaaacagacgcccgattattcccaatccccgtcccccaattccgaaacatgcgcgaaaaagccagcaggatccctccgtagctgttcgcagacggtcttcctcgacaaaggctgtcacacccgccgcgcgggtcacacgagcacttcctattgcttcaccaaacacaagtgtgcctcgcgtccaagcttccccagctccgcccgctccctcacttcgtccgccgaattcgcaggtggtaggctcgctgggcccttgggagccgtccattactggcttcattccacacgaggagattacaaaaaccctttgtgatttcttgtttcaacatgtggtcatgagaaatgatgtcaataccggcccagtaggctctgttgcggctgccagtcaaggaactatcatcgaaattgaggcgaaattgggccatattatcgacttagacagcagagagcggattcacctgccaattttaaccgagagtgtcctcaatcgagagaatgcacgaattcggacatcctttgagagcaacatgactgtggtaagttgataattcgatgtcctatagcgaggatgcctcgacctcgatgaagtttacttaccatgatccacaggaacaacacagagctatgaataattttctgaatgaggctgtgaaagcttcaatgccccagcctaactcgacacgaatcccacttgcatacgtgcacaagaaagaacgtgacacattctatgagattcaagcagccgatttgcccccggtgatccgtcaaaatttgaacccgaggcacaaacccaaagtccgggtgacaaccgatgaacgaacaggtgaaattctcgcaaaaatcgtcaaatgtcgagttgccgacatggacgtctgcagtccgcggacgactgtggactggcgcgtcagtgtcaatctggaaatggaatacacaggcgatgtcagcaatctcccagtgatagatgcagcggtcgtgaaaggcgcacgaggggatcgcatcaaggatcgcatgagctaccgtcacttggcgtaccaggtggacttgactcaggtagccaaatccgatgtaagtttatccaactgttctgtgtcaccctcaaagcagtctgctgaccatattacagcaacaaccgggcaagaatgagttcgagcacgagcttgaagttgaggtctcggctgatgagattcgtcgtcagggcaagcttgctatgtcgggcgatcccaagaaccagtacgaggatcttgtcaagggctttgtggataatattcgtctgctggctcgagcggtgccgccataatggtctttaccgctttgtactatgtatttttttctgattcaggctttactggggtttagtttgtggttcactgcagatatggtttttcgttttatggtaaaaagtacgcattgcaatagacatcatgcatgggttctatgttgtttctagagcgacatcgttacctagacaagggaatgtcccaatccatcatttggttcgcctcggtttgacaaaatatatcctgtgtagatgttctataaaagaaactaatacccatcccatagtacttgacgaccgattcgagaaccttgaagacagcatcactgtatatatgctccacatatggtaccgatgaatcttttagatactcaaaggtaccgtctacaactaaggtagtatcctcagtctgcgggtcgccaacattgaagcccatcggcccaataactagacgtatttcacaagcgacccgccaccacaagcgaccatctccagaacacatagtaattgtgataaattacaacctgatatctcaacaacggtggtctataagaggtttttcttatagctcaatactgacacacttgatttatgtaaggacttcaaatataaaggtaaatacctaggaagctttttgatcactgccaaacgagtaaaattactcaactaactagttagatacctgactatttcgtaagctaatcgctcggaataaggaataatagcaaacaggtaggtgactctatatactctgtacatgagtcactaagacatatgaaaaaaatatgaaaatgaatggatgtaggctttcagccatgcagctcacgaataaaaatatccaaaagttgaaaatcaccaagccggcagacgggaagtccatttctgcaagaattgaatgcgcttgctattcatggtcaggggacccattccccacgaatcgcccagccacatggtcttcgcagaggtcttggtgcttggcttaaactgcggcaacccatttccattagggtttccagtgcggatgaagttcgcccagtagttggccatcttgttctcgacagcatagtcctcgctgttccatgtaacattggagtacgaagcgtagggaatgttattgaaggtgtaccagagctcggagccgtggtaagcaccctcatcgcggttttcggcaggagcgtgagtgaagtagtaagtgtacacgttactcttggcgccgcctgcagcccagtcggcggcccaacgccaggtgccgacgcggctgagatcacggtagaactctttagcgctttgcgacgcctgggagctattttcgccgggatacaaggcgaagaaatcgtctgaaaggtcgccaaagaggttgctgtagagatcgtggtagtcggaagacgtgtaagacaggtctgggctggcaccggactcgtccttgttgcttccagtaagaatgggaatatcggcgtgagaattattgcgcaacgctcccgagtagttatccgtgaagacgtatccgtcgatgttgggccgccacatagggggttccatgaatgtggcagagaggttagcgaaaggagtgccttcccaaatggtatcggagagcgagtcatattcaaggagagcctccatagacacattccgcaactgggcaatggatgtcacattcatttgcttgaggaacgcgactccctgctcttcagcggctttcttggtccgatagctagtggcaacagttccagtcatgggatcgtgtgttcctcgcgcaccactctctgatatgataccttcggcgaggccctcagctagcgggctccacatagcatcgagggcactagcagagccagcggattgcccgccgacggtaatctgattagggtcaccaccgaagagttgaatgttctcgttgacccagtgcagagctgcttgttgatccagaatgccatagttgccagaactgttgtggccagattcagcagtaagttcggggtgggcgaggtatccaaatggccccaaacggtaatttaaggtcacaacgatgatgtccttttgtgccaggccagtgccatcgtatgtcttgacatcaccggaaccaccggtgaatcggcctccataaatccagaaaagcaccggcagcttcttggcggacatattggtctggttcttgtaggccggagtccaaacattgaggtaaagacagtcctcactggttgtggtcttgccactggagaagatgccagcatcgctgattgtttgcgcgcattgtggtccgaattcggtcgcattcagcgtgccccatttcgatggaccggcaacctttgtccaacggtttgcacctgtaggaggctgtgcataaggaatgcccttgtaaacgaaggctttatcgcctccgcggaagggtgagagaccgccatggattgtaccgtagtgagtgtcgataaccggggggcttagggcagaggcgatggacgagccgcaggctgccacagtagcgagtgtggaaagcagcttcatggtaggtataaaagaaagaatgaatgaatgagataaagtgtcagacaaaaactaaagactgaagagaaagattgtgagctcgattgctacataggtaatgttacctttcctaatatattgagacatggaaatactcctaggagatgatgatacgcggccgctgagcaacgatctgccctccatgtttcctcatccgaaaaggacactgatgattatgtacagtttgggtataatctgcatctttagtgagcactcgtttcaaactttggtaggagactcggatataaatgtggagtcgcagatctccgtcggggctgcgttcttattcggggagatcgtaaaactccggcaggtacccgcatgtggagcacatcctttcctatccaggattagcctatttcccaattgaaaattactgaaaattactgaaaatgtattttttttgcatttgctctccttctatatctaccaatatgaactacagtcattatatatgtacatacatgtggctagttactatgggtagactttccacatgttgtcggagtatatcgccacacttgtaagactgttgtaaagatgctaacactgggctaatgctgtccttgcatcggaagtctcaatgtgtcttcaagactgcttaatgccccttactgttcatagtgggctaagtttctttgtattgtgacctaggttatagctgcattctatatttagaatgaaatccattttggctcaggctgttgagtggaattgtgctcggccgaacaggtatcataaaagaacaaaattacggtgatggttacttaatttggtcaatatcttttttaaaaattatcttcattcgggaggaaactgcaatccctatccccaaaggcttatatcagagcctaatctaacctctgttccatcttaaataacaccagccgcaagacagagtcttgccaatggcgatagaatgtgttgaccataagtacttacaaggaacctatataacaaaattctgtctcacatggcagaacgctagaatcaagagtgaaagttgcccagtttagtactcgtgcaaagtggacatccagcgacggaggaaggcgatgcgcttcttcgacgcggcgattggaaccgcaccaaaggagtcgccgagttgcatagcagagtagttgctggaagacgcagggaagtgaactaaaccatctccgttggggttacccgtgcggataaagttggcccagtactcggatataaccgattcaatcttgtaatcggtggcattccaagtgacattggagtagtcggagtaaggaatgttgttgaaagcgtaccagagctcagcaccgtggtatgcgccacccgagccctctgcaggagacgaggtaaagtagtacacgaagacatccttctttgcaccaccggcagcccattcggcggcccattcccaagttccaacacgggccatatcgagcagtacagcatcgctattagcgctggcctgggtgtcggtcttggcagggtagagagagaagaactcggcggagtagttaccgaacacctttgtccacaaagtcttgtaagtggaaacggtagaggcacctccatcattctcgttcttgttgttaccagtcatgatgggcacatcggcgtgggcgttcagctccaaagattcaccgtatccgtgacggagcacgtagccgtcaataacgggacgccagcggggaggtccggacaagaggtcagagaaggcagtgccctcaaagtagtcgtcttccatcaattggccctctccgataaggtcagccatagggagcttgcgaagctcggcaatcgacgagacgttcatggtcttcaggaaagtgacaccaaaggcctcagcaacggctttggtgttgtagctagtagcaacaccaccagtggcagggtcatgaggtccacgagcaccactttcggaaataacaccgtgaatcaaaccgcgactgagaggactccacatcatgtccaatgcactagcagatcctgcagattggccgccaacggtgacttggctggcgtttccaccaaagtgggcaatgttgtcttgaacccagcggagagcaaactgctggtccaaaataccgtaatttccagagctattgtgtccagactcagtcgataggtcggggtgagcaaggaagccaaaggcaccgaggcggtagttcaaagtaacaacaatgatatctttggacgcaagaccggttccatcataggtgatgacatctccggagcctccctcgaaacggccgccgaagatccaaacgtagacagggaggtttttgttcttaatctcagtagcggaggtggtgttgtaggtaggggtccagatgttcagggtcaaacagtcctcactggttgaattcttcccagaagagaaaataccagcgtcggagtatggctgggcacactgaggaccgaactcagttgcgttgagtgtctcggtccatgagtcgggcttggtgggaggagtccaacgcttcgacccggtgggaggtgcggcataaggaatgcccttgtagacagttacgccgtcccggaaaggcgatgctgcacccttgaccggtccatagttactttggatgacggggaaaacggccgccgcggcgaaggccggggtggcaaggagaatagaaaggaaggtcaacattggaaccttgaagatgttctcgattgactgttatgcgaggtacagattaactgaggggtgatcagcaagaccttatatatagtccatggatatcgatcgagccctactcaaaatagtttcatgtagaatcgataattacgcggactctaggctaagcccatgtggagctcatattggagaatgcttgcctggagatggaactgcccctgagtatgactggtacttaccgatatccacactgtaggagagaccaatggctgtctgtcgggcttcgacatgcgccgcgcggcatccctgaagaaacatgtttatttgacgcgacggttgatctgcagtggctgtactccaccgatacaaaagaaaaacaaattggttctgaaaatgacgaagccggcaagaaagtgtctccgaatatgccgaatgtccgagacaccctagtcccaatatggaagtccacaccgaagtaaatatcttcttcggcttctttggccagctaatacgatacctcgatgtttcacgtcattatttggtttcgcagaagtgtcattccattttgcatgaagcagatccggaaaattatgcttccagaatatttctcgcctatcatcattgattgagatcgacaaaagtctggagaaattgatacgatttatatgaatataataaatcccccacagttatatgtcaatctgactgaaatccttgggttaattgcttagtgggatcatcggtataggtgcctgaaagaggacataaaggagcagagactgaatccacttccgtcttacgatatggaagatctacagcgttgaatttcccagctacaccatcatccaatgcttgaatagactctccagtttgatcagtggcaccaacccgttcaaccacttcggcaactcgaaacccgaaggtgtcgtatgacctaacgctttcctcctaggcatatacaaaatagaacgggttgttgtgaacttgtttcgatatctatttaatcgctcccacgcccagtcctcgtgattgtagtgaaggatgcatagcaacaacctcacggcaacataacttttgtcggcagtagcctgcctccgataacttcaaactggcttcatgtctgccgagcatttcaaaatgttaagaggaccgcgccaacagaacaaaagatagcgcttcgtaccttgttaccatgtgctagtgtaagtccaaccatcacaacttgcaaacaaaccatattcgcgatatggcccagagagttaataagcgacagcctggttaactaaatagagtgttcctgcttctggtattctatggtagcctgtatatggctctggcgcgtagccctaattggttctgggccgtttgccctggatccgacggcatccgacataatgcaggactcggttctctgcttctgaattccacggcaattcttttctaatgaaacgtacattagtacaatcaaacacctctctccagtccattcataaaaatctccttttcatgaccctaagaccaatacaaacgcacgctattcccaatctggaagtctgacgcaacagatactcacctgcaaccacgaaaggtccgaagggaacagcagaagttaacagacctccatcagccatttgaccatagtccattgtacctcaaggccctttctctccgcacctccaatgggtgtgaaactcttggataatatccggatcacagaatacatggcttatcgatctacctgcattctcaagtaggtggtattggcggcactggggtaaagaatatcagtgcagccactactgggacttccaaggggatttggctatatatcaagggtttggtcacgtattccaagagcagtcgagacctaaatctctgttggcacactgataaactggagtctggcacacatcattatctctggaacatactcttcaactctacgcacgtctacagttcacgatatggataggttccacgctgtatcctcttttgaggatgaaatagaccagcctccgggcacatttaaacttattggaggtgaggctccttttctcctagattggagtgtttattgacagtatcctgatccagacgacgcgggagatgaggatgggcaatgcatggtccttctctatccgattccctcgtctgacccgaatgtacctctagtgagtcggcactggattcatatctccctgattgagctaattccaacgcatatggatagaactggagcaccatgcgaaaatcagtcaatttcacaattgtgttggctatgacaattgttatcttcacggcgtaagtgaggaggacaatcatctcagattggccagactggtaacattgctcccatctcaggttatcgatccaagccatcttttggcagcagatgaccgttgacctggaagtcacctataccgaattgaacaaagccatgtcggtaaatttcgtcggtctcacaactggttgcatcttctttatcccctttgcgaaaaagtacggccgacggccagtttatatcgtctcaacagcactaatgctgactacgtcattttggacatctaaaatgaacagtttgacagagctgtacttgaccaacttactgcaaggtttagctggtgcaaccaacgagtcgatagcagagataacagtgagctatgtctttgggccgatagtaagatgtcctgttaatgttgtacagattgccgacttattcttcgtgcatgatcgggggagtatgaatggactatacctgacatgtgtcatgattggtgtaagtctctcaaccaaatagcccggagatttatgcaggtacctgatgaaagcacgtatagagcttcttgacccccatggctgcaggggcacaagctacacagtatggctggcgctcttcttatcaaacaatgggaatcttcaatggtgtccttttcgtcctcttcctcttcatctacgaggaaacaaaatttgtctctgtgtttattgggcaagcccgtgctaccgttgaagaagctgatcaactggtctcaatcagagaagatggttcggacaattttgactcggggtcttccgccaagggcccttctgtcactgaacatactcgttctcaccatgtgctggacctcactataccgcggaactcctggcgcaaacgccttgccctggtaacgccaacaccagaaccaatttggccgcacttctaccgccccttctgcgtgctcatctttcccgctgtggcatttgctgcgtttcaatacgcggctggaatagcctggctgacggtaacttccagcgtcttgtcactcacattcccagagccaccatacctcttctcacctgcgcaaatcggatacactagcgctggtcccctggtcggaaacattatcggtgcagtgtacggcgggttccttggtgatcggtcgattttgtactacgcaaaacgaaaccggggttattacgaaccagaaatgagattgtatatcttacaccttccagcgattttcatgacaggtggccttatcatgttcggtgcgacgatttctagggtaggtaacggcattaaaagtcaagttcccatttgggcttgggctctgttggtgagtgagtgctaacatgctattttccggattgcaggggatgcactggatctggcccaatattgcaggtgcctttttcggatttggtttaggcagtattagtgatgctgcattggtgctagtcatggacagttacagggaggtatgattatctcatttcgatatacatgatacttcttttgtttcaagtgagccgtttctactaactcctatttctagatcactggtgacgctttcaccgctgtgacgttcatgcgcaacgcggtcggtattgcaattccattcgcgatctctccatggatccagcgcaacggcatacagaatatgttcatcgcgtgcgggatgctgagtctagctattactgggacgattatcccaatggtcctttggggcaagtccggtcggcgcgcattggcaggccgatatcgcgatattgtgaagaatggccatgctggttgacggatgtttaagtgaattttgcctgcgtgttttttctttggcgacgcggacttcctaggtgtaatttggttgcctgaattggggccgggtgatattgggctatgtcccccgggatatgttgcgaattgggtatttgatggttagatctttcattggataatttaaatgatatggatttttaccattcatggccatgaagttgcggcattgtatgtcttttcgaagagattcctgaagttgtacgagatgatacattgcagtggcttgaggattccttgataggatacatagtacaaggcactccaatttcgtcaatgtccgttggtcataggtttcacatttattcctggtttagaacatggaagcctgatctgaaggagagagcaggaatatgagaaaacccctaaccctaactcatacacgacaggacttagaatattattgcaatgtgattttgtttaactaggaaaggtgataggccgagaaaaagaatctacgtagtcagatgaacaaatgtatgcgtaagaggcaatttaaagattcgccttgtgcacgtcatcaccaacctctttcggcaacgccgcctcagcaaatctctcctccgacacaagcagctgctcagggaaccacgagagatccgaactgacagtttcaccgagggaaggatcctgggcgagcaacatagtcgccaccgccttaccaccaagccaagcctgaaccattccgtctccaccaaacgcagcacaaacccactctgccccctcagacccatgctcagcccgacctgtcacagctccaggcaaccgtcctacccacgggaacccatcggagctgaaagccatactgccagtccacatcgcttgcactgagtcgccttgcacacggccccagtctttgcttccgaagatggcacgcagagccccagacaaatgaatatcaatgtaaagactaagatcagagtctgtcgagacgcccagatccgctaggccgccgtcctcgctctgcacgaagcctccgccgagcatcatctgtccctccggcagctgggtcatgtagtcgaacccgcggtcgtagttgaagagccacgaatgatcctctgcctgattggggaaattgtcaccgggggtctgcgcggacatttggccgcgaacggggaagattcggccccgaaatccgggtacaaggtggctgacatgggcattggtgcagtgaatgacgtgccgggtggttatggtgcctctgcttgtcttgaccatgtatcgttggctgttggcggtagtttcatcgtgtatagcggtcacggcggtgttttcctcgacgtggaagtgatccgggaagtccgcaagcagacgcgtgaggatgccggtgacaaatttgtagggccagagggcacctgcggggccggcgatgacacctcgggcacgagtcaaacagaattcctagaaacgacattagcggcacttggagcgttcggtatgaatgatcaacttaccttcgggatattgtctcccccataagatgtccattcagcggcttcctccggcatttcctccttgaaacggtgcatccgctccaaagccgtcttccaaggtttatcgcggaaatagatgctcaggaaccgaacctttcgtgcttgcgtctctgccgtgatgccaagctcctctgcgacagtgagcatctcccggagatgcgccaatcggaagcggatgagattacgcgcggcatccacgccaaggacatcggcgaatctactatattcgtcggctgtctccaggatgtgaccgccattgcggccggttgcgccgctgcacactgtgcgagcttcgagcatgacaatggatgggtgggaggtggaagagtgctgcgaagcgcagttctggagcaagttccgcgcaatagatgctccagtaataccagatccgatgatgacaatatctgcttccttgcgcagatgcttagctccctggctgaagttgtgtgggtttcgagtccagaacgacgaggtcgtcgaactttgggggaggcctgggtcggagtagatgcgattgagagcttgctgtctagcagaagctgaaaccgaggggtctgtcaaaatatctgtagcaaaaggcatggttgctgaaacgtcaaagccacaatagagaggaaaagaagagagataggcgggagagaataagtaactcgcaaggagccagagtaggagatgacaacactccccaggtcttacgcgagatcgagaagataggtgggaagattataaaagaaaacaaaaaaaggaggctgaagtagtcaggcccaccattagatcgcaaaacagaagtagcaatcagaagtagcctttggatttgcctacctggtacctacaacagtaccgaggttgacttaccatgctgatgcacctattgactcccataatgaggtaatctcttctcaagggtttcctgtccgcggataccacctgagcacctgcatatgccccatctgatagagttcaagataaggcgctggtgggtcaatcttgtcgttgattgtggggattttagaacacatctgaacaccataagatcatgagaattacgggtatcgttagggtacactcactagctttttttccggttttgtatctaactctcattctaacttgggaagaggccgaggtcttgttacatttcacattgaatttaagccggttcgcgcggttagctgaatcgggtaataatgtgacttgatgttcgatctgggaatacctggatcgatgtgttttattcgagcaatttcccctcgacatcaagcctaagagatggtggtcaagtaaatacaaccaataaagtgaatttgaggttggagaggggcttgaataaatgacagcatacagaggggttgcatttccggttagagagttggagactttagagtctattatagctgacattcactctacgtcattatctttctaatatttgataatattaccatgcaagaatagtagaaatgaaaatgaagcgatgtgattgtacaacccgagtgttatcgcagactcgtttagactcaagcatcaccaagccatgtgggaaaccaagataagtgaaaaaagcggaggtggttacatcgtatcgcagccgagcaataaagtacatagaacgtacataaatagggagatagccataaagtcacaaacgtgaaaccacatctaccccacctctagaatgacatccaaagcacaccccagcagctggcaaatcctcgtcgctgccaaacaccatgaatgcgagcaaaaaattccccgagactggcttctcagcgcagaccagctggcgctcgcgcaggaaactcctcgtctactagatattgatcttcctcgtcgcagtaatctgctctcggatatcgaattagagttgacagaaagttataccgcaattcagctgttggacaggctggcatcggggcacatcagttcgttagctgtcacaacggcattttgtaagcgggctgctattgcgcagcaggttgtgagtacagcgcattactgaaaggataaaggagcagtgggcttaatatatattttgtacagacctcgtgtctcacagagaccttcttccccgaggcgctagagcgcgccaagtacctggatcagtacctccagcgggagggaaagcccgttggtgcgctacatggcctgcccatcagcatcaaagacagtttctgcgtcgaaggtgtgcagtcaaccataggatatgtcgcatttctcgagaatgagcccgcgaagacgaactccgcgctagtggagatgctgctacagcttggcgcggtgttatacgtgaagacgaacatcccacagacaatgatggtaaaaaaacaccaaatgactcggaatatggtcaataagtgaatctaataatcacccagacagcagactcggagaataacatcttcggccgcacccttaatccacacaagacaaccctaacagcgggcggatctagcggcggcgagggtgcactaatagcattccgggggtcaattctgggcgtggggactgacatcggtggctcgattcgcattcccgcgctatgctgcggtgtatacggctttaagccaacaagcaaccgtataccctacggcggacaggtctccggcgccgtacaggggattccaaacttgattccagctgcaggtcctctggcacataacatcgccgatatcaagctgctgattggttccatcgtcgctgatggccaggcgtggaagtatgactctgctgccgttggagtcccgtggcaaaccatcccgcctggtatcaacgccagcaaaagcttgaccatcggcatgcttgctgaggataagcatttcccgcttcatccgcctgtaaagagggctctaaatcaggcgtttgaggccttgacgcgcacaggacatcatgtcgtccgaattggtggtgacgatgaagcacagagtttggcatatgcgtcacgtgttgcgtttcagtatttcaactacggcccgcacaaggatcttgtttcggccagtggggagcccgttgtgacttcggttgctaagactgcgggaccgatgtcctctggcccgttccctgctcagcaaggtctaggaccgtttgagactatacaggcgttgcatgtggctcgccaacggattcatgatgtttggagacagacatgggtggaccagaagcttgatgtgattctggctcctggagctcagagcacagctgtgagccatgatacgtatggatggcctgcttatacggtgatatggaacgtcttggatgtaagtctttctttcttattctgcttgcttgaccttgattctctgaggtctataccaactttcgccgatctagtatcccgcatgcattattccatttggaaaagcgtccaaagagcttgatcccgatcctatgacaacaagtaacgatgcgcaaccagactgtcagtgaacccgtctcttttatcgaatagattactgacaggtaccagatcaccccgatgaggtagatggcgccccatgcgctatccaggtcattacgccgcgcttccaagatgagaagtgcctgtgggcggcggatatcattgaccgtgtattggccgttcatggcaaggaataatggaaagctatatggctgttggcactgcgcccacctagtcttcttaggcgaaagtctggctggatggctaggtatgctcggaaaattcatgggtatgccattcaagatcatacgagtttagtgactaggaaatatcatttggcgccggttgctgttctgcaagaaactaaattcaaaaggtagaatacatatgtgaaaccggttctgctccgtttgatatcttaaaaggagtgtggaaaggacaagatgttggtacttggaagagaaaagaggacaagaactacggactcgggctatcgtcgtaccgtggtcctccgtcattgccaccatacccggcaccaggtgtagcagccattccacccatcgccggagtgggcgcatcaaacgcggcaggggttggagcgtcatagtctcgttttgaggggccaccgggagtgggtgcgctgaaagctccaccaggggtgggggcactttcggcccatccgccaggagttggcgcgccaggggtcggagcagcgtatgcaccaggggtgggagcggagtagtttccaccaggggtcggggcatcgtcaaaatcacgttggtctctgccgccggacatgctgttccagccgggagtccggccgcctgtggcaccaccggcattccagccaggagtccgagatccagaggcgaaggcatcgaagccggagctggagtcgtatggtgtcttagatcctgatgtccaggacggggtgcgactgccaactcctccatatgcggtacggtttccgtcatacgggttcgcggtacgagagccgtcattcttccaggctggagtacggctgccattcaagccaccccaagcaggagctatataatgatgattagcaacttcatcaacttttccaagatgattgtactcacttctcgcagcagcgccactccaagcgggggtcctagatgaatcggcggcgattggcgttcggccaccagcccagctatctctcccaggaccgcccgaagaagtgtgtggagttcgccctccagggccacctcctcctcttccgcggcccatagagagaggctgtttggaaacgggactgtgaaaagttaaaaacactgtggaccaaagcaatggaggagtaacatactctttaggtgttaaaatttcacgcgggatgtgtacgggcttgttagatgtgtaaagttcaacttgtgcagagctgtcgtccgcgtcgcggacaataccgacgagacccttataacgacccttgcggatagtcacagtctttccgatcagctgatcgcggccgcgacggggtggtggcattgcggcaccacctccaggggtttgcattgccagggcagggttcatcttggtgagatcaggtccagtgggccgaccacctcttgctgatacggtaacaacattcgttgtccgcacgacggagatacctgcgttctcggcttgcgccttattatgcaagaaaaggaacgaacggtgaatgtgacggatgactccactgcgctgctctccgtagacctcacgaacagtatcaccacttcgaatctctgcgccattgcgatcagtagccacagcgtcgcgacggggctcaatcttgtttgcgatttgcgtaggaagaatgttgcggatagaaccattctggtctatcacacggagggactcccggtccactttgatgacacaagcaacagtggcggcatcgagctgaacgagatcatgaacatcgtagatgccgagttgtccatcggcagccatctcagcagaaagtcgaagatccttgctgaaaattgtgatctcctgcatactcatatcgctgagaagagtgacggtgtcatccttgacctgcacgaccatgcccaattcgttctgatatcgactgccgccgataaccttgacgtgatcaccttcacggaatcgtttacggagagttcgaacaggagcgtcgattgtctgaccggccagttcgccctccgtgacttgcaatgaaataatgtcacctcgagttgacactgtgcgaccaataagaccctgctgttcaccccggtaaacctccactggatcacccggttggtatgagtcttcggcggtggagttcttcagagtctcggccagtgacgccagatccagattggcagtcccatcttctcctccacgcgcgaacattgtaacctcctctagccgggggttcacattcttggcattcaagtgctgaacacgcatatccttaatcaggaagccatccacgtagttgtcgttcaagtagttccatgattttccacctagaccagaagtagacgaaagatattttgcgtgcttctttttcgcctctgtctcactgaagagacgctggggagggcggactgtgttgacagcaccgcgtttgcgtttagcatcggcggcaggggcaccaaaagcatcgtcattcatgccatagtccaatcgaggaacaagtctgacagtgacattcaatccattggtttcgacctcctcaatctgggccagatcgcccatgtatttgccacgcttgatgcgaatccaaccaccaggcaaaagctcttctgatttctgcacgcgaagaagatctggcatctccttcactggaactagggtcagcttttgggatgggtagtagaagttaatggcctccaagccttcagtaacatcggcctgcctgcgcgcttcacagtagaaccagccttgcataatgtttccgcgttcaaaagccgagatgattcgaatgggattgcgggagcccgctgggcgctcttcaattcgtttctgaattgaatatacgacctccttttccttgccaggcttgcagcgaccaccccaaatgctcgggtcttccacgctgggaagcaggagtcgtttcgggatcacgagggaatctgttgcggcagcacggttgcgtccatatcgttccttcagcatctgtgcttgcttctctgcgtccatgctagcgtcaatctcgcgctgacgatccagttgtcgatggcggcggtcgtctgtctcggtgccttgaggtagcgcgtcaagatcatccgggtgtgtttccatgccatattcggcgagctcatcttcctcatcatcggcctcgtcctcctcgtcatcgacaccggcctcgtcttcgatgaatggattggcaacgcgcttcattcgcttttgtggacgactcgcctgaaatcgaagatacgcgttaataaagatatcctccattactaggtctccatagagaacataccacatcctcttcctcatcttcgtcttcctcctcgtcgtcatcgtccacttcattctcgatctcctcgtcgtcttcgacatccttggcatcgtcctgctcatcagcgccatcgccacctgagtgttctttcttggttggctgtttcgcactcatttgttagcgttttgtccatcgaggtttgaccgaaatgcatagaccgaccttgactttgagatcctcggcatcagactcttcttggggagcagggttaaagtcatcctcctcgtcctcggagccgaagtcttggttgagaaagtttgacattttggcaggtagtatctagcgcgctattgcagataatccggtcgccactttcgacagtatttagagttcgatatagtcggatttctatcaatcaccaggaatattagtgaccgaaaagacgaagcaaacatgcgaggaagacaaaccgtacccaaggaaaccgcgctacaacttgaaggctgggagatagatgtggataacaggatgcaaagtgtcaagtattttctgacggacagccaattccgcgcggcgtgaagtcaattgaggttgatccaaacgagagaaaagcgactggaaagttgagaggaggcacagcagacagttgacctctgcgggcaatcaccgagttccgcgaccgcttacaaagaacactgatcagaatggagacctctgggtttgtgagaagaaaaaatagcctgaccacaatgcaggctgaattatacctcttcttataaaggatagtttgagaaagggaaaataaggaattgaagtgctggggcgtggaggtcgagttgcccagaggcacaatccttgcgtagatggtcattgtggtgcgccgtacttggccgccttttgagtccagcactactgatgatcgtcggacacgttgacccacttttctctactttctctatatccaaatccccattcgaggatttacttcattttgacagcactcggaggtccaaactaccaaacggactatgacaagtgctacacgacacgcgagtcccctatttatcacgcgtcggaaaacgtagactaatcctgtgatcagactcctccatctggatagacaatagacccagaagaactcgactacgcaggtgacaggccaccggaggatggctgaagttacgaagttgcccagataggtggagagcttgttccattgacttccccgtcaaccttggatgaagtcattgatgtgatcaataagcgcggtctacagtcagtgaagtccaagaaggcacgaaaagtaaattttcgcaaacgatgtacaacatagcaatatgaattccaggcaatatgccctatatgatatgattaatgatctcgggctaatcctatgctatcttgaaggtttcccttattgaacatatttaataaccatgtgtggcagtaagcttggtgggggaagaagatgatgatattatgaaccccttggtgggggtgctatagcctatagctaactatgactaagtacctgtgataatatgctgggcctcaaaaaatctcggcctccggctgagaaaaaaaagaaaattttaataaaaaaaaataataagaaaacgaaaaggtaaaggtgcgatgtggcgtattagttgttgtatacctggggcggagtgtagatatatgagggcgtgaatttatacctggggttgtacagtggacccttggtagccgcttcgagaggagcttggcagtggttattatattctttattatctagtagtaataggttctctggtactgtcaggaccccagtactaagaaggctgatgcctgaagtatgagacctgtcacagtacgtggaagcacccgtcccgggtacgtgggggactatggactggacaggagcaatatgtgctgcctacatagtccctgtaggtcatgtaacccacaacctatatattatcctcgcatactacttctttagagaggcagctattagttccaatataccactgtatatactactatctctatttcccaatcctctattatatacagcattcccttaggcattctatacctaggggtctcaagatttcttataccctctatatagtatctatatagtactctttagggtactctttaacgctatcttagataaataagttatatcctattaatactttatatagtaactttctagttatactataagttattatattatatataaatactgcgataggaagctggtatacctagctatcttactcctagttagatatcggcaaagcccacccggcccaccaatgggctgggctttgggctgacttcttcggcccacgctaaattatgggctgataccctaggcccatagcccacgatgggggcccatatgggccttatataatacagtgatctacctacataattaatgcaattttaggcctgtattcttattacagcgctctcgtccaattataattcatacatatgctaagcatatgcctagcatagttaccaatatatatttaataatatatctctgcgatattctgatatatatatatttctaccataccaattgttacgaccccgagggtcacttgcacaactggcccatatgggccgatatacttgctaagtaagcgccaggggtatatacacaccgcgcacatgagatttagaaccttagcgattagtctactgaattgtataacccacgctagggacctccactctaattcaaacctccatttttaggatacactggtagctagtcctaacattctaatcgcttcatttttacgaattagaccactggaacccataagatacctcgaaatacccgtagcagaagccgggtgttatagggagatatacccctacctgccggttaagaaaaccaaacgtaggatttacaaacccctactgagataggggccatacctgccaaaagagccgctcctataaaagagggggctgcctaaccgataaaattggcaccagctttaagctgggatcttctgggctcgacaatttccctcaaagctcaccacgaatgcatgggagctttgaatttgcgcttcgatttgcacaagataaccaagacgtcagcagtgatgaggacgacaggaaggaacctataatcgatgatcgatttgctaggctggtgtcccatggccgcagctttatcgaagagagtgctgcttttcagaagttgcgagtggaactcaaaaacttcctcatgccgactttcaagcctatcttcctagatttcagattcgattcagatgaatggatgataagatgcttctggtgcatggaaaaacttctatcaagcatcgggcctttagaggagagtgattcgtcacatctattttctacccgaccttcagttctgacaccatctcgagagatagtactcttttctgagcctatagctcttgatacgaacgtccattccacagagctacctaccccttggtccagcattcaagttatcggatttctgggtcttagcttcaaactcaaccgcttgcagtgggcgcggtaagaatatcgtggaaccctcaagagcttttttccagcttcggtttgcaaaatttgaatcccttaccacaacatcaaatagtgctactatgccaaccatgttgtcaaagtgaaccttattataaaagttcgacgcgtttcacgtgggagtacgtgggagtggaaagcaatgtcgatatgaaagacttcaagggaacaatatcctgggacccagccaaacttctacgcaaactctacttgcgagagaaaaaagtcccgaagtatcacaaacggtttaggtggaagaatgtgaggtccaactaccttgcaagctcatcaaagtgctaataatcaacagcgacacggtaaaaggttatatgatgattacattgaacacgagcatggtgctctccaagccctccataactacctggatgctaccactgttcctaacaaagggatgacgcccagtgaaagtgtccagagctcctcatatgcggcccgtctctatacaccaaatgccccttccacacaaactacatatccattaacgaccattgatatcgctgaccagcctgcaaccaacccctacaattttgaaaccagcaacgtgttccatgatgttgaacaaccaactaaatccacacgctcactactcctcctcacttgcattaaacgccacggtcgacctgtcaaactccaccaagaatttgtcacgcacatcgccgacgaccgccaactcttccatgcattacgcaagatatattttaaccaccggcagaagtttgaattcttttggtctttgaggacattgcacagcatccattttatgagggtgtgtttttcttcttcatctaatgatgtcttgttttcttggtaccaaagctgggaccttacatcacctgccctaattttgacgtatatcatcctgacatatttttctcagttcatctacgctggcaactcatatattgacgtccgctgccatgctgaaatttgcactcccagtaatccttgcgcctgtgtcccacctcctggccttgttccaccccaggtgacctataactacacctaggtagacgactcttacctcaacgactgactaactgcatacccttacgataagccactgttcccgattggtgccggggaacaaaaagcacattttctccacggccatatcccggaacaatcgacaattttcagagctggctacttttgccttgtttatcttcactggatagtttctggccaatatatatttttcatgctatcggcggtatgcaaactcaagcaattcaaggttcttatttgcagctctctagtcgcattggcgatcttccgccagcctatatccaatccctggtaacctgctcctcaagagtagactgctgcagacgacgctcacgctgcttaacgccatggctaaactggcccagactgggtcgagtctgatatgccctccactggttttcacaggatataaaactccagcagccacaggtaaagcgatgagattataaaccaatgcccatgcgaagttgaacttgatcctcttaaagacaatgcgactgagatcgatcagtgtcagtaatgagtccaactgagacgaaacaagaatgaaatcggcagaggagatggcaatgtcggaaccagaaccgatcgcaactcccacatctgccattgtcaaggcgggggagtcatttatcccatcgcctacttgaatcaacgttcaacagtgctgtttcaatttttgtaatgaacactcaatgaaatttccttgtggcatcaccgcccgctgctgtctttccacgttcaacacatactgtagttgacgatgaaactaattgattgagaagaaaaaagaaagaaaaaagaaaagaaaaataaaattacactatcgttgattgattctcaacggaatttatgaccggaatccctgaccggaggaccttaagaaatgaaaatggtggaaatgaaataattcggacctccaaacaatgaggggcctaatgaggttgctcaaattttgatgagctagagtactgaagtgtacaagcgtgccggctggaaatcatccatccatgccccgtaaaaaatcaaagtaccagagttgatcaatgttgaatcaaaacaaataacgtcagccttcaagattaagggaacaaaaaacaccgaaaccgataaaacggaaccctcatggccgttgagtctgaatatttttatttcaccatgcttattgtttaagaaattaatgtatcccagcccgttggaaaaggccacccgcaacaactctagtaacatttgaccacaaccgttcttaaacctcagtgtaggccacacaatgtagatgtgccgttgagatggttgctcaaagagaaatcatgttcatgtgtgtgttgagtgatcaaattcatactgtaacttgttttcgtacccgttgtgctacagctgagtagtcgtataattcttctggcaaattcataccttataaaacctctctttttggccctttccctcgctgggttagtcacaacgtctttgcagcagcaggcgatcccgggcgatgaatacgatgaaaactacgaatcgctcgtccagaaaattgctgcgccaaaagcaatgtcgccgcaaaacaagtcttatgaaaaaagcatatgagtacagcaagttgtgcaacgcagatgtatgcatggggattcgcatgcgggagacgggccaggtacatattctgtcagcggattcttcgggcttttgggcttttcttgctttacaactagtaagctttattatgacgtcatgttaagaaataaaagctaatttgattagaactcctactatccgactccaaccttgacatccgaccgtgattttgagaagagcggggaggatgtaaaggtccaaactatgcaataagatttcaacttgttatctacttagaaaaatccagttctattgaaaataccgtccgttatgttgctcgttgcaaaaagccagctatgaactcgtgtagcttgaggctattaggagcggcggtgattactacagagcaggtgatcctaggccgtatccttctggctatggatctaagtactcagccagaaatggccaactagcgtccaaggtagcttagcagccttaattatctgaagtctggatttacttcagtgcacgctttcaatctttcgatttctatccttattatatcccataggcctactgtcgacgtttcgcaggtcgatgatgatcgctgttatgtcccatagaccagacctcaaagcggttagcgtgtctcacttcgttgctcataaatacactaatcccgaaaaggaaagtcggccactactactttcctagaaacttacagtatcggatcaggagtagagtagaatttacttctatgggccgggattcatggtgagacccataccagtaaagatactctgtaggaaagaatttcattatcattagcgattatttttctaatgcgaagctagaagttaaaacggggtggggcagggaaaccaaaatgagactggaagaacaagaatcaggaacttcggtacttcgtatatcctcgctttgcgcaagccggcgactggtgcaagagatattattctttttgaggagcagtgcgaacaatttcttcaaatggttgaattacccgaagagcaacaactgcgaccctccatatgagacgcgtctttccttcactccgtccatcgataagctcccactggagacgaacgttagaatcacctccaggagctaataccctcataaagttaagggccccggtcactgtggagtaattaagccaaagattttctttaggaccagggataccgtagacagcgctatagtctaaagagtaccgaatctctctagtaaataccctaagggtatcgccttcctagactaatataatagggcaaactgtgaggaattttttatccttaggctaaatagtgataaagatagacttatttcgcatcgcttctgcctttatttgtaagttaaagaacctaccgagcagtttagctgatactttatataatccgcttaattagaagatagtctcctctatactagagaaccacgggttaatagcgcagttctatacaatcccaggaatactaagtctatctattaagagcggttgccttaactatagtcttcctattaaatcgcctttactctccgcgaccactcgctcttccagttatttaatatagaagctatacctttcttcctagagtcggacaatctctattagagaaaccccagcttctaataaataacttttacagaagcggtcaaattcctttatatagtataaaagaatcttatcgatacctacgttccgtatatcgaacaatcctttctagaaaagacggcactacctttaattagcgaggctaagtctatagcccgcttctctcataaatcgctcggtagcaactttctcagccatcgtgaatttatctagagggcctttcgaagttagcaaatcctttaggtcaaggagctaggcgcctttcttaataatctcccaatatatggtttcgttaagccgagactatatacttttgcttacagagaatatattctcctaattgattagctagatagcatcggggtattataacttaataataccattcataaagctctgaatctcttcgaccttcgttatcaggcttacctgctttgaccgatgtccgtatcttctaagggaatcgttaagctttatacagttcacaagtatattctcaatgatcctatgcggtactttcgcgtattaagaaatgtctatggcggacaaagacgtcccatcctaaggtataatcattattacgttcgcctcggtcgtcaacgtaggttcggatagtatatcaccttcccgacttactacagagtgattcgcctcttgtgccgtatctttggcagtattatttcctttgtttcttcttttcttcttataagacggcgtatctagccctgagtagtccacttaacttcttttttcagatatagggaggaaccggtaagagccacgctttgcttctagatccggactagctctgggagtaagaagaggtggtggatctgttatgcctacctagagcctcttttcgcggactatacatgtcagtggaaatagtctgccaaggagcgttctgggcctcaccaaagtcagaaatgcctaggatgtgttgtttaataggttcatagttgcagtcgccgattccgcagaatacaagcaactcctgaactttccctgccgtcaaagactgaaaagcttcctccatggttgtattgtgctggggaagtcagtcacaagagaagttgtcgaggggagatgctgcgctgccgcgccaattttggttgcgcgggtgaaactaacccgaaacgggaaatctggagtctagaccctaccagaacaacatagaaaagaagggaaagcaaaagtgtgcgagctcaacgtacttcgcgaccacattgtgttcaatgtccggtatagtacacgtctcaagagaagtaataaaggagactccttgcgtgtgcgtgagcattcgacaacaagacgctcacattgtcctataacctctgctacgctgtctcccaaagtttcaccaaggcaacgatatggcccgtctcgacgtaggcgaccagttgaccgctattcgccggttgattgagttatccaatcaagcatgggtacctatggttcacattcgggaacatcgtgcaacttgggatagttgagccatattatgaattgcatcttgatcagaggagcagaggaactatgaatggtcgagatgtgtacttgaggaaaggacaggcttcacaattcatcgtttcgaaatgaaggccatattgaaattcagtgtgtttacattcctatcgtgtctgaagacaagctttacacttccaagagcccctgagcttgcgccttcagggggcaataatcgctatcatcatgatcatcctctctcttctctcatcttccccacaatctacgaaactcgttgcaccagcgagccgatcttcatggtgaaaccttggaatccgtatcactttctcatcaaagaactgtctcttgattctcccttttatgaacctatgtataagttagtccgaagtttcttatgatgtaatgaaagaatctctgaatctccatcaccgacgaccctatgtaccccactgcaaaggccaactacaccacctctgcagccaattaccctcatttccattctcttcctccccttccgccggcggccaaacagaattaaaaatgacctccaactgcgcagccccctcagacacccaacgacgggcactctgcttctgcatatgctttacggccttgacaccgaccagaaggtccgtctgaaccgtccaagacggagccggcgctttgaagatattgcaattcgacactattgatatgcttcttgcagcagctgcaggtgcactatacaagggatgaatctttaacttcgtgaggcactgacccctaacctggtgggagcggatgtgtgtaaatatagtcttggccagatccttgtcgatagcggagttaatcattgtgtctctgatgtaccagataggcacctcgaggccggtagaaggcaggggttgagacttctcaaattccgttaggtcgcgcggtggaactggggaggggggttcgatttcgttggggtccacaagcggtgggcagttcaggtagagctcgagagttgttagagctgggaacagggcgagcgcggtgtatgcgggtgtttcgaggccgcgattgcgttggatggcgatgcacagggtctggagggaggggcaatgggctgcaaggggatggatttcctcgacggaacatattgggcctgtcacactctggccttttgcgcggagtcggcggagtgtctgatggttcaagtcttgggagccgacgttgagctttagttcaagtagcgttgggccgtgcttgcgaagggcagtagacaggagggctggtttgtagctacccaggaggcagaggtatgtgagcggggggagggagtcgaacattgcctctacagctgtgtagaaggataactcgtcgtcttgcggtgggaagagagcgagggtgagtctatttagctgctggaagggacggagaccggcaatagcgcgcagtacttgggtctcttcgatgcagccaacggtccacgattttaagcagctgtaatctactagcttatcccacttgaggaactgcccagccggcattagggtattcagcggccacgctagctgttcaagctttgcacgcagtggttccaccccaacccttccctcaacaaccaccgtctcgctgaagtcttccttcgggccggcctgaccacccgcgacaatctgtaatgcaagtctcttgacatgcggtgcacgaataatcatatcttcaagaactctatctgggtgctccctgaagttcctgcgctccggatgctcgaaaagagtaacatgtacggtgtgcagctgcggcgatagaacccaatcgtctgtctttcgatacatgtctcccacttgaggactcaagtagacagatgatcgacaatctggatgatactgcctgatggccttgtgaagctcgacagggccgccgttggacataagaagatcaatatcccgcaattgagggaccttgtgaatgaggtcaattacctcggcgctctggttcgttgaacaacccctaaatttgggaatgctttgacctcccaaattctctgtcttaagcgaagcccggaggccgctgtaggcacgaagcactggtgcgcgcggtgggccgctaattggataccatgggacgatgatactgagtcgctttatgtgtacgagaacacggctggcttctggctgccagtgaaacttatgagagacatcatctttgagtggacgtataatgatatgctcgtacaagagcggcctggcaattctgttccattcttggtccaccagggagagtgcagccaagctcttcatacattcatcgcccatctgcagatatggtcagatatcaacaccattggagaaaaggtcgacgtacatatctcgcaatcagacatttgatctctgatggcagtcggtccatgatttggtagaaaggtttgatgttgaacagagagtaaaaaaagctagctcggggaaaatggctttcttttacacagagcttacctaataccacgtaactaacgtaatccacggccgttcggaacaccccaaaacaccatactaaatgcgataaatgaccacttcatatctcaacaatcatatcaatcaatgataatatacttaaatgatagaatctagagagtatttttagcccacttgcgaagtgtaggaagattactggaagtattaattaagatgtatgtattcaccttaaagtgacgccgtattttgtagtaaagcattgaaataaacgtccagactgtttgaaactaaggctttctatttcgcatgctaagaagagtctgtatggttgttgagatatgaagtgggggaccctctcctttactactggtatttaccgcctgttacatgtattgtttctgcttgcgttacgtaccgtttttggagtacaagattgtcagtttccatcaaatagtaatacacgctcctacacatctctgaaaggtgtcccttcgggtccgtcccggtgtctgctacgactagagtgatggtttgtggtttgttccattactgctgaatcgacccgtgtacctagagtgcacagcccagagcgttcccctcttcactagttacttagtctacttcctacctagcgcaaaacacgtctagagctacacccatggatagaactcctgctctgctccaccttcctccacgggtacaacccaacaacaccctaactatcagcgatataaaataacatatgataacagggcgccatccccgcgctatcatccatatccacatcttcatccgagtccgagtcctccacatccaactccggaatatagcactgctcctcattcgtccaaatccgcaccttcgaaattgtcttcaagcccgtcaccggagtcacgctctgatccgcccccagtgccgttttatgattaatgagaaaccaagcctgcgggttcccgtttggcgttcccaggagcgcctgccccgtctccgtgctcatgtcaaactcccagtaaaacacctcggccgcggacgcgtcattcgccgtatcgatgctgatcgcttcctcgatgatcgcccgcgtgttcaagttcaccacgttcatctggaacatgtacttgatggtgctagggtcggaggcgcgcgccgcccactcgatccacatcacatctgacagctgctgaatggcgggaagggagtcagaggagtcccacttgccatcgacttggagctcttccttcttaaagccgggggaccaggcgaggtccacgattatggcgttgttggcggtattgtaccagcactggtagttggcgcccgtggcctacttatttgattagtatgtttatctccctgtgggttactttccggcaggtcaagtagaatggaaaagtagaatggaaaaggtgcaagcgaatttaccgggtgcgtactatccaccgccaccgtgtgctcccagttcacaaccacattgttggatggggaaatccccagctcgttgagcattgtctgcccaacatactggacaaagttctcggcaagaccggtgtacgggttttggtcgattgtccagccgcaggccgtaagctggtctcgggtcagcgccgttgcaacaatgctgcgatcgaacttaatcagggctgtggcgtcggagtacccggttgcacatatgaggccgctgcctttattcttgcaggtgtcgtagtatgcggaggttctcttggcgagactcttcacaggcaatgagaagccagaactgaagcgttcgtgtctggggaaggcttctgcccaggtgctgctcacgaagagggcatttatgagcaggaagagggtggctagggagaggccatgtttaaagagggtcatggttgggggtgctcatgcgtgagctggggtaagattggtaaaagagtgtagattgtagtgagagaatgaaggaatacaaggaaagaaaagaacgaatgccagtgtgcgatggaaggagaaaatgtcgagatttgtctaggtatagggagatgacaaggcgtaataaagagtaagtccctctgctaccgtatcatttggcgatgcctgctcttccgagggctgcggcgttccttgtcataacttccctcgctagcaactgcagctgagcatcatttctccttcacttctgagcagcctcttacaagcgagtactttcatcgtaatttccggaccctatccactattacactagctcgacaggaacatgtctttggacaccaaacccttcatcacggccggagacacgatcaaaacggcaagagtgtacgaggcatgtacccaagtttggctttaggttccatttcttcatattccaaattctctttcgtcagttcatagtccaggatttttcttcttgcacctaaatccctcaacatccagggccccttacaaataccatacactagccaccgtattaccaagaccataaaatagttacaggccgccgggcggagccatcacttagagcgcaatgctccattgctccactaacgcaacctgcgcctgatttgtccagggagctgctatggccattacactagccaaaatataatgtattcttcatatcaaatatcgccaaacgccggtcaaagtgtcggctttccggcggtcccggcggccgagagaaggtaggaactattggatactttagtgcatttatggagtgggtctcagacatactagaaagggagcttggataaaaatgtacctgtagtaaagtaagatgactttgagatctcaccgacggtcaaataaatgttgaaaatccaacgcagttgtcagcttttgataaaccacgcttaatgagataattgaaatttgaagcctgaaatcctcaaatctttattaactctaatgaggattcgaagaaattccgtatcgagaaagaaaacaaaagaaaaaagtatagaatattttgatttgtcaaaaattgccgaatgcggcgctggaatttccacaggaaatgccgaacattggacaaacaatggtgactcggaattgggtactagtagcatttgttccgaggactggaaactcgaattaatgtatcagccactttgatcaccagctgcaagattttcagcgaggagttagtccgaacttgaaggtccttcatgttcaggtcaattcattaggtaacatttaccactggcattgggagtagattgttaacatcacatgaaagattatacatgaaatattcttgctacatatgtacttgacactacttaaattatgggcctcttattcacaagtgcgagatgacatgttcaaattgcagtcccccggacttttctatatctaacttaagaaaagttcacgtcactgcccagtgactccacagtatgtcattgcttaattcatgggtttcagggtggagacttcagtgtgggaatgaggacataggtagacgtaacatgatatgaaaggctcgttcgtcagagtgtgatcgacatcttcaatcacgagataccaatacagacataatatccaacccacagagagctgcaagtgtcaccgacagtagggttccaatcgtaaaactcatccagagtgataccagcatcgctggcaatagttgcacactcgtctccactgataaccagatggtacgcatcacagttgtccaccatgccactctcaatgggcgaaggagtggctgatggggcggaagaagaaccggaagtcactgttgtggtcacaaaggtagtggcacgagcagtggttactactgccgagctagaacttgcagccacgccaacacagacatagtcatcaacccagagagaggcgcaggtactgccaacggctggattccaggcatagaagttggtcagactaatatcatagtcgctagcgatggttgcacaatcatcaccactgacgactagataaaactcgtcgcaatcactcaccatgccagtttggataggagagggagttgaagggactgaagggattgaagtcaaggccaaagatggagttgcagtcgtagatgggatatagctcaaggctgcagctggtacgggtacagaaggcgccacaaggtagctcgagggcaggtaagtgccaacgacaaagttcacctgtacgcagtagtatagatcaggaagcatttcacagcttgagccaagatccattacaagcgggttctaggtaggaaagcattagtaaaagtacaagtcatggcatcaagagtgtcatttctttacccattcttcaaactgtgcggcggtaatctcgtaaagcacttcgactgcctgacaagtcgacccttcctgatacaagtaccataaactgcaatcctcgctactgccgggggcggcaacaccggccgggctaacaagatagcctgcagcctgcccgagggaaaggctaagggcagacagagcccaataaaaagatttcatggcgtacatggaagaacaaacttgagattcggaacttgaacttctaaggttgaacttgaattttcgggttgggattttggatacaagtttggaatagatagacatcggaatatatatgataccactctcgagattgaatagcttggacttagaactcaatttctccgcaacacccggggcctatgtgcaagaagactccaccacctccgaaattccaaattcccaccgttttcacgggaacagagatttctggtcagaagaccactccgatagtcctcctagcgatggtcggagccgggaggtggggattagattgccaggaccgtgacatctagaaaaatcatcttcgtatccacagaagccgctttccatagagtcttcaacgaaggatgttttgaccaaatctagaaacaagtgccgtatattcactggtcagcggatcctgccaagaaaattccttaagtcaattttcacgaggcttgtcaggcttgtcacaagcttgtctcccgccgtaggctagatgtgccgaaaattaattaatgagagcaagttatcttttcacgttaagcaaagtcttcgctacatggcccaatcacctacctgtgtatgaatctggattgttccgtggagtgccgacgctaagcattggtgtgtgctatgtggagaccctgctcaggtgggattggtgtgtccatgtcaaacggccccacccggacattgcttatccttagaacctcaactagcttgtttagtgcagcagaatatgtaaacactcacatgtgggtaggttgttcggtaatttttgaattcggccagattccgaaatcctactaatttactgcagggctcgccttcccttcccatctccactccgagttacagcctagtaattgagactatactggaaagggagtctttaaccacatggaggagcaggagttgagatgatttcaacgtaaaccaatcagaaaaatccctcatctggtcctgcgctttgccaaatcattttcactgaatttagtctgaatcctagcttgaaaccgggattttcaactaaccttttgtatgacggtggatacaccgcttgaattgtcagtttaggaacgtctctacgctgacatttggtcctgagtttcccttgtttactaaatggtcattcctcggaagtaaagactcttcactgttctccatcaacctacctccctttgcctgagagaaggctatcctctcatttgtgaccctcagtggtctcttcttttctttttcttgttggcagactacctttgtcaattggcttcattcttgactctcgactttcattcattcctttttttactttccatttcatcatgcgatgggccggcagtttggccagtttcctggcatggacacttgtctcccaggccgtgcattgtatgtgcacgaatgtgaatccagctgaggtttcatcgtctgttagtgcgtacctggcagcaaaccccattgccacgcgccaggcaacccagacagctgatgcagcgagtatgatggcatccatcattgccggtgacttcaagcccagactcttcgcggcgagcaggagtcgatgcccagtaagctgcagcagcagtggcctcagctctactgcctggtcagtataccacagcgtcagacggcttgatctgtgtaacaacaccatgctgcttgatttcaacatgttcaatgagctggatgatccaaacacgcataccagtattgcagcttgtaccgcggactttgatttctcttcttcagtcacaggaagctcccaagacagcgcttgctcctcactttctgtcagccagtctacaaatatatcttctttggagctagcctcatctggatcaacatcctccactggcgtgtcagacattattgatgcccttgagcaactccaaaatttcttcactgtttctggctccggatgcgatgacgcgattcagatcgcctactcaggtcaggcggcagtcggtgtttttgttggctctggtcttcacagccagggtgtcatctcatctatactcaagaaatttatgacccaaattgagacagatggcaccattgccgaggagactctcattcaactatgcaagggctccacagctagatactctctcggcgtgttcgccagtaccgagggagatctcgtttccgtccagaaggcgattcagtcctggagcaatggcagttgtataacttcaatggaggagtccactcggaactggcagagcctctcgttcacggttgcatcctcgaatcaaaacttatcgtctctcagcaactctacgtattcaaccggaaatgcaattctgcctggtgcgaaacgctcagcttctcacccacagcatgcctactcacattcttatcttcattatggtcgtgcggtgaaaactcaactgcaagcccgtgacgatagtgacgaatgcaccaccattcaagctatatcgggtgatgacccaacctctctcgccagtgagtgtggcatcacggttgctgaatttgacgagtataattcttcactcaacatgacagacctccaagctggacagcacgtctgttgcacgaacggaactatgcctgattacacgcccaagcctgattccgatgacaactgctattcgtacacagtccagactgatgatacctgcacagctctggctgcggcctacgacatcactgtcgccgagatcgaggactggaacaccggaagcaatggaacgtggggctggatgggctgctcggacctgctggttggcagtcatatttgcttaagcagtgggtggccgccaatgccatcgaccatttcaaatgctgtttgtggtcctcaagtcaacggcactgccaatgcaacccatggtaccgatttgagcaccctcaacgagtgtcctctcaatgcatgctgcgatatctggggccagtgtggtatcaccgcagaattctgtaccaaatccaactctactacaggtaacccgggaacagcagccaaagatcaaaacggatgtatctccaactgcggtactgatattattgtcagtgatgccccagctgaaatatattctatcgcttattttgaagcatttgaccaaacccgaccatgtcttaccatgtccgttgatcaaattaacaccaccttctattctcatgtccactttgcctttgcaaccctcactagtagctatgctatcaatgtcaccggcatagaggaccagctttctcttttctcaaacatgactggcatcaagcgcgtcttgtcgattggcggatggtccttctctactgatgcatctacttatatgatcttccgcgatgcagttacttctgccaatcgtgacaccttgatcactaatgttgtagatttcttggagaagtgggacctcgacggcgtggactttgactgggagtatcctgatgagccagatattgagggaattccagcaggaaccacagcagatagcaccaattactatatcacactggacctgctgaagacctccatgccaatagggaagacattgtccctcactgtgccagcctccttctggtaccttgagagattccctatcgaggcaatcagtaccgtggctgattacattgtttacatgacctatgacttgcatggccagtgggactatgacaatgcttactctgacgacggatgctcagctggcaactgtttacgatcccatgtcaatctgaccgaaaccctcagcgctctgtctatgatcaccaaagcgggagtttcttccaacaaggtggccgttggaacggctagctacgctcgctcttttgaaatgacggaggctggctgctggaccgacatgtgcacctataccggacccgattcgggcgcctggccaggtccctgtacggacaccgcgggatatatctcgaattatgagctcgagctggtgatagcagagaacccgtctgcagttcagtactgggacaacagctcgtatactaacattttggtcttcaacgagactcaatgggctggatacatgaacgataccaacaaggcagtgcgaaccaccttatacgagagcctgaacttcttgggaacatcagactgggccgttgatctgcaatcggaggatggcaacgaagagagtgccggctctggtgtcatttacatcagctcgattatcttcaatgagactgacccagaagtggctggttacccgcccttcacgatggtatggcctatctcctcggttgagcccatggttgtcaacttccctccgtatccatatgtttatattgaggggggctatgggaccacttcttggcactccgtcccctcaagaactgttgacggaatgagctacttccagtggtcgggaccagcctcgggcgtcccgaccacaacgtacactcttacccccagctacagtccctcgccactgacaatcatcggtaatgatggtgatgtgcccattgtggtgtatccgccccctatcgagtcacccttcactacaccgtacgctgtcgttgatggccagagttacatggttatgagcggcacagccacaatcggtgatacgaacgggctttctattatcacgggcattccctctccagccgccacgccccagacagtcactaaagtcatttacgttgaagacccagtcagcaccgccagcaccgccagcacagcggccaacaacacggtagtagttgtggtattgcccactgacgattccggctctggtacgaataccctgccacagacaacctccatatcgggcaccatcatatatacttggtcagagcagcagatcgatagcttggccaccattcccacgactactaccatcacgacaaccaatgtcaacgacaaaacaaccactatcgggatcgtacctgtcaacaccggtggcttctactggtcgccagtttctgttcctgatattccattgccaacagtgcctttccctgatttggcgccgattcccactctcccttgctttaccctctttgatatcttcacaattgattgcccaccgagcgatgacacgaaaagcaaaagctccaaaaagactgtcaaatacacaagtgcaaaggaatcgcccacttgctctcccagtacggccaaatcctgcggtgtactctgcacatcaaattgtagtccttcatcgacatctacttcgacaacgacttcttctaccacttgcagctccgaatcaacagttacagactactgggtctcatgtgactctacagcatgctcaaccacaagcaccgccacggtcaccgggtgtcaagtgacagctagcacgacgaccacgggtgtctactgtgcagtcacctctatcaccaacatttggtccactgatgatcaaggtgaaaacggcggtgaatactttacctccagcacacaaaccattcccgaggaagttgtcgcagccggaactacctatattgctggttccgatggggccgtcacactcggcaatggagatgtcattactgttcctaccagcgtcgctggcacaaccactgttacccttggcacagttgttgctacagttgacccctccgaagtgactgtcgttgccgtggttgtgactagtgaagtagtcgaatctacttccgcaagctctacgtccaagactgaatctacaacgtcaacgaccaccaagaagactaccagtactaccacaacagtctccataccaactgccactgagttttgtgcaaagtatgttattgaaaacgaagacacctcattggacaagtacggttctgagtacgatgaatttgtatttgttatgtggggtatccagtgggacggacttggatcagcggatgctgaatccgagattgagggcatcttggaggattgtggtatcactgcagatattcatgttgcagttgatactaccgaatggggcacagtagcgatgtggaataacggcgaaaacgacgttatcaccccatgtgtcaaactgaaaatcaaggcattgggtggtggtacaccttcttgtaaatggatttataagacttctgaggatgtgaactacagtgccaaggattctgctgaagctgagatgacttggatctataacaatcacaaatctgtgatttcggcgccatatcctctggcaacctgaacaaattgatatgcaatctgatcttacaatcaggacagtcagtcaactttctttccacaaggttctcttacggttgttcaaccttgaaatgcttctttttgaagatggaacctcattcacttgtacttacatttttcttttatcattttgaatccttggctcatagctggtccaagtagtctacacagttccaacattttctctctgtaaattacatctcgcttcagaatcgtgtgtacagattgcatagtgatttcaaattttaagtggctaactaagctgcagcaatgagatacatacatgtatcccccttcagaaaaagtcttactgggccccataagacaaattttcatcgaatctggaatgcatgaacactatggagtcagtctgttgcacaaacactttccaatggaaacgaaccaacggcttgtggactaccgaaacatttcggcaccgtggactgtcaatgacaaaaacgctgtggtgtccaaatatgaaggcttcattgtccctcgatcattcaggtttttcgacaaaaaattgacaccaatcgaatttgaattctcttcattcttccctcaaggaaactgcgaccttgagttctttgagcggctctcgtgtcttctccatgatcacaacttggaaaacgtacttggagttcgatgcctagacaaatttgatcctgaactatccgtggaggtcactgagggcaagaccaacatcatgatatcgcggggatctgttcagaactcagagcttattgaagcattctggattttcagtaccgacgatgaccaaagatgccattgcagagaatcctgctggaaagattccgagggaaagcatatcgaagaccatggatgctcttgaggcagtagaagatgtcaagtttcctttggcaagctagtctgaacaacctgtcatagatttcatccttccggacaatggagattacgtcattgacatttgctattcttcggaagaatgacaagatttgaaaacacccaactatctgtatttcacaaagaaaactccatgtttttcctggcatccaggtctgggttccgtagcatgctagtaaagtttccctgctttgtttccacaaccccaaccggttcaaaaccaaatttagagtatagctgaacaccatcgggagaggataaaacaaaagtatgaagctcatttttgtccacaatgtcgcagagcattttcaagagcgtagaaccaacacctttccgttgatgatcagggtccacagccatgaatgtgatcccttgagataggttaatgaggctttgaaaggtcttaattggttgcgagcttactacatatttcattgtcatgccatttttggaacactctttgcctctccgctctgagcagtttggagatgccaagccatgagggcacgtccaaagaagggggggtccagctatcatgatgtcccatcttcctgctctgcctttcttcggagttgattatcgagtcatcttggatgaaattctgaccattaatcatcccctttgagaagacacctgagcaggtggtccaacctatcaatccgacaggtaggccatctgctccgcatgccttgtaaagcgattcgttctctcgacaaattgcttcatggattccatcaattgcccatttgatttcatcttcattgcaatcccactgctgttctgttgagagtgggaacataaagcgacggagcggactatctaggtgcgcaggaaattcgacccgtcgtacgagcacactcacatcctcacttttgacaggcgataaggagaatgccatttgttgctgacttgcaagaggaagttttgatctttgctggatgtcttgacgtacaagggagaacaactcacgatccacagatgagtcacatgcctcttactcagccaatagggcaaaatttcggaacgtggtcgttacagtacggactagtacgggcatagccaattgagtacttgagagtgtgaattgttatatactgctgaagatgcacaataaataagggggttgagcttagtaatggaggtgctgaatattccccgggcgcactagtaacatggcgaccctcttttgtcgacacaaaatccttgctagcaagcacagggaaataatttttgccattagtagctctcaaaaaacgtttgaggcaactaagcaatatgtagtaagcacctaggagtagatcgcaagttcccaggaatattctagcctccgagaaatactaacaagccccagccactttttcaatagcatcatgccaagccctaaagatcgctttgaggccctcgtgtttaaagtgaagataatatttgccaagcggatacacaatctagataacgttcaggaggtttcagatacgctatgtaggctcggccccgtcattccatcatttacatttcacccgcatcctttgacaaccctgtaacgcgggcacacgtcaacaggccctggacgaagcggactcagtacatgggtacatccaggatctctacggtgtacgcggcagagctcagagggctcgttttggcgctacagatagcactcgacacaccgccaacgtataccctgccagataaatgcgtcgccatattcacggacaaccaagccgctatccaagccattcggaaccccaagcacccatcgggacaatacattttggtcgaggctattcaagtactcgaacagcttcgagaacaaggatggcaaatacagttccgatggattccagcacatgtcggcgtgccaggtaacgaggcaccctaccaagcagcgaaagcggccaccggaagcaatccaagcacgggagcgagcactgagcgaccgccagaagcggactctctgcggacactcacggcaaccaccaagtcaatcatccgtcggttgatgagagatgagtgggatacggcctgggagaatgccaagcacgggagagagctctttaggctcgaggtgaggccagggaaggcgatactcgacacgcacattggcatatacagagcgatcagctccgccatcacacagatgcgcacgggcaagattggcctacgtgcatacctccacgccatcaacaaggccgactccgaccaatgcgaatgcggccacgggccgcaaaccgtacggcacgtcctgcttgagtgccgggactgggcagacgaacgacatcaaatgtgggcaggcagggctccatgcagacatcaaacgcattctctgtagcccgtcaatggcagtataagcagcaaagatgctcttgaggactgggctgctgggacaattccgagcagtgccatccacggtactaaaatatatatagcgaagaagagtgatttaaattgtttatcttacttgtttgaccagacaagcctgtacaagcttgctgctcattcgatttatacaggttcgcagaagtataacaagctaagaaaaacacgttagcaggatcgtgagcgattggtagctcagggactcgtgaggttatacggacctgccatgttagcctaccgccttcagtgagtgcaatagtgatccctgtacagagagtggggtctattgccaatgggaggcgctatgtaaccgcttgtctcttgtcgccgatccgttcaagtagtcatatgcatatttcgtatgtaaagctgtaagccatgtcaccgaaggtgcctgaaatcccgtcccaattcctccactgacgtagctgctggtctagattgtaagttggtaaaagcaagaaattatatgcattagttttacatgatgtgtaaattgctttaatgaatgaggccatataagttagttactctttcgatctatgtaggttcgcagaaggaccgcaaataaggagataggccattgtgtgcgattggtaggcccaggctgcgtgagactgcacggtcctgtattattgacctactgtgcgaaccaatcaggtctgtctgccgtacgctgctcattttccgtcgccttgggtgatctggttgacaagaagttagtagacgggttgctaaaatatacgctgtcgggcttatgagcgtaagtcttagacagtcagggggcttcacaagcactagagagaagttgggaatcccctagtaagcagggtaaagaaaaaattaactggcttatattactgacatgaatcgttcgcgtataaatgaagtgggattaaactaaattaagtttagttttgcagcttattgtgagtgacttcctctagtagtagcgcttattggctcagtaagtatcagcctcgtctacttttaggtatgcagccgcctatcgacgtgttaatttaataataacgacgctctcgacctaatgatatataacagctttgaccccgcttgtcatataggagataagctgatctgtaacgtccactagggtaatccttactaatctagccattcgaattttaacctaacgggttagctgtaggtagcgtagccgctggcataagaaaaatttggaaagtcaccatgtgggaaaagtttatacagcccttacgctaatgcatagattctagatattcaagagccagtcaattactgattcatgaggtatttaagaataggtccagaggagcctcaatgctaacgcgtcaagggctataattgtctagcgtttatcatctgtgctctgggccacttagatctgtcaggcttaagaggggatcataggcatctcaatctcgacagagcgatgccacctaacccttccgtaaatagtaagcgagtatggagttcacccactataagtactccaaagccccaacctgtgaaatgatttcccagtacattcatgattatcttattgaccaagcagtcttcaatttacaacccagattcgacctaaaaactcacagtcaaagcttcaaaatggctactaggtatctccaacggttgagagatacaagaagtatccaagaagttccgataggaggggtacaattcgttacttttcaacaaaggcatgcaattggaacttctaggcttagatcttattccgctgttatcatagcctcgagatacaatgcaatactcgtatacataccaccacttccttctgtaacacaagttcctggtacaggtgacaacaatactcggttcataataaaccaagtacaagctcactacaataccaatcgaaattatttcccctcctcggaaacatgagtcatttacactgtctatcaaggccaagtggcattgccaagtcaagtgcaaattatgatgagttatcttcaggcaataggccttactccaactattaaatactatatagtacccgtgaatccgctcattccgggccagggaacggttgtggtcatgagtagagcgaacgggccttcgatatatcataatgatgctctgatttaggctgaatatactcttgagacgaaatattcaagatcattgtaatgggttgctgatcggcaatcaagttcataggagttttatcaagtatttggctctttttactataactacctctgattaccaaattcaaaatatataccgtacttcctagttttttttcagcctcgtgtagcatacgataagcagtgtagccgaacatagtgaagccatatgtattctgcagctcattctttagtaaatcatccccgcaaatatcctgaaacggatagccccacttcttattccttttgtattagctagaactaaataacaattgcgcgtgacttgttacatcgaccatgtaatacgggtatttaagcgatcgggtcgccctacttttccttaaatcctactggtaacctataaaatactcaaattctcttcatcctatatggatatccggcttcttctaaaagcagaacttactaaccatactaggttctcaattccttgtagaactgcagtaaacataattaaaaaattgcgttcaacgtgtaccgataataacttccaaggattttagaatgcaatgtactctaatagtctcgatatagtggaccttcatgatataataatagaagtaattcatctgggccgagtcgaattcgtttcactacttctctctcatggcttcccgataaagccttcttttactcgagaggcaatagtattcaaggtaaagcgcgttctcgaatgttttcttgaagctgggtaggacataaatgatccagttgatattctaatacctcctgtgctttggtaagttggctccactattcgaaaagccattccaataacaagagatctgttttcatagctatgcggtaacagacgtcgagatgaccagatggtttctagaacatggtacaaacccaaatacgtcgtgcgaggtagactgcaccccattgtcctatactattcgaaatgctcgtctaagtgtcatcaaattaatgctggaccatagaggagatgtgcgaaaaggacaacttcttcagtatgccgtttgtcgggacgaggggctggaagatataatctccctgctcgtcgaaagaggcgcgcctttaaatgcgacaatgtataaggatggccagactttgatacatttctatcccataagcctagggactgcgcttcacacggcaacagaacagggaaagatgaatgcaatccgccttttgaagcatctcggagcagacactgaggtgaaggacgcgaatggcgatactactttagaataggcacaaaaatggaataaaccagatatagtaaggcttttaagagacttggaagatcattcttaagcatattcgaaattgaagataggaataaattgagactagttacagcactatgatcaattttctagtttatccatattatcatttctattcacagtcctagatagggtgcctatcgtctatatcttgaagtcatcacccattcacatactaccagcggtaggaagaccaataatgccaaacgtaatctacgcttagtcccattttgagtaatataaaacgccttacgcggctcctgcagttgtatagaaattcagtcctccaacgcgtccttatacgacgaagagtcgtggaaggtaaatgatggcgttcatataaagcttccctggatacttgtattaaaatagatggccttagaggatgttgtggatgttgtatacagcggaaggtagacaggcgcaaacaacccccctaacgaccctaatagttcagcctctctcattcgtgtccctttggtctcccagatcgagagctggccttatagcgtaatttagttgaatagtggacttgaagggatgaaatatttcgacctaggaagtgagtcgtaatcttagaccatgacattgcctctttttccttcagccgcactagcagcgcattcttgtccgatgtgtacgtactgtgtttccctaggatgaccgccgtatagggtcgagacagcatcaggctagggtcgggtacaaaagtaaagaaatataccggcttcagatcagaattagattcgaccataaggagagcactcccacgtataccttggatagcaccaggacaataacatgaaacgggagtggaagagtccgaagggtcggaaagtagcctgattgaaggtttccgtttcttcctcttttaacacggctgttctgtgtcatagaaggtagtattcccatcttggtcgttgccagtgcctcgacttgagcggagttgtcaggaccccagtactaagaaggctgatacctgaggtattgtacctgttagggtgtgtagggaactgtagactacgtaggagctatatgtgctgcctatatagcccccttcttannnnnnnnnnnnnnnnnnnnnnnnnnnnnnnnnnnnnnnnnnnnnnnnnnnnnnnnnnnnnnnnnnnnnnnnnnnnnnnnnnnnnnnnnnnnnnnnnnnnnnnnnnnnnnnnnnnnnnnnnnnnnnnnnnnnnnnnnnnnnnnnnnnnnnnnnnnnnnnnnnnnnnnnnnnnnnnnnnnnnnnnnnnnnnnnnnnnnnnnnnnnnnnnnnnnnnnnnnnnnnnnnnnnnnnnnnnnnnnnnnnnnnnnnnnnnnnnnnnnnnnnnnnnnnnnnnnnnnnnnnnnnnnnnnnnnnnnnnnnnnnnnnnnnnnnnnnnnnnnnnnnnnnnnnnnnnnnnnnnnnnnnnnnnnnnnnnnnnnnnnnnnnnnnnnnnnnnnnnnnnnnnnnnnnnnnnnnnnnnnnnnnnnnnnnnnnnnnnnnnnnnnnnnnnnnnnnnnnnnnnnnnnnnnnnnnnnnnnnnnnnnnnnnnnnnnnnnnnnnnnnnnnnnnnnnnnnnnnnnnnnnnnnnnnnnnnnnnnnnnnnnnnnnnnnnnnnnnnnnnnnnnnnnnnnnnnnnnnnnnnnnnnnnnnnnnnnnnnnnnnnnnnnnnnnnnnnnnnnnnnnnnnnnnnnnnnnnnnnnnnnnnnnnnnnnnnnnnnnnnnnnnnnnnnnnnnnnnnnnnnnnnnnnnnnnnnnnnnnnnnnnnnnnnnnnnnnnnnnnnnnnnnnnnnnnnnnnnnnnnnnnnnnnnnnnnnnnnnnnnnnnnnnnnnnnnnnnnnnnnnnnnnnnnnnnnnnnnnnnnnnnnnnnnnnnnnnnnnnnnnnnnnnnnnnnnnnnnnnnnnnnnnnnnnnnnnnnnnnnnnnnnnnnnnnnnnnnnnnnnnnnnnnnnnnnnnnnnnnnnnnnnnnnnnnnnnnnnnnnnnnnnnnnnnnnnnnnnnnnnnnnnnnnnnnnnnnnnnnnnnnnnnnnnnnnnnnnnnnnnnnnnnnnnnnnnnnnnnnnnnnnnnnnnnnnnnnnnnnnnnnnnnnnnnnnnnnnnnnnnnnnnnnnnnnnnnnnnnnnnnnnnnnnnnnnnnnnnnnnnnnnnnnnnnnnnnnnnnnnnnnnnnnnnnnnnnnnnnnnnnnnnnnnnnnnnnnnnnnnnnnnnnnnnnnnnnnnnnnnnnnnnnnnnnnnnnnnnnnnnnnnnnnnnnnnnnnnnnnnnnnnnnnnnnnnnnnnnnnnnnnnnnnnnnnnnnnnnnnnnnnnnnnnnnnnnnnnnnnnnnnnnnnnnnnnnnnnnnnnnnnnnnnnnnnnnnnnnnnnnnnnnnnnnnnnnnnnnnnnnnnnnnnnnnnnnnnnnnnnnnnnnnnnnnnnnnnnnnnnnnnnnnnnnnnnnnnnnnnnnnnnnnnnnnnnnnnnnnnnnnnnnnnnnnnnnnnnnnnnnnnnnnnnnnnnnnnnnnnnnnnnnnnnnnnnnnnnnnnnnnnnnnnnnnnnnnnnnnnnnnnnnnnnnnnnnnnnnnnnnnnnnnnnnnnnnnnnnnnnnnnnnnnnnnnnnnnnnnnnnnnnnnnnnnnnnnnnnnnnnnnnnnnnnnnnnnnnnnnnnnnnnnnnnnnnnnnnnnnnnnnnnnnnnnnnnnnnnnnnnnnnnnnnnnnnnnnnnnnnnnnnnnnnnnnnnnnnnnnnnnnnnnnnnnnnnnnnnnnnnnnnnnnnnnnnnnnnnnnnnnnnnnnnnnnnnnnnnnnnnnnnnnnnnnnnnnnnnnnnnnnnnnnnnnnnnnnnnnnnnnnnnnnnnnnnnnnnnnnnnnnnnnnnnnnnnnnnnnnnnnnnnnnnnnnnnnnnnnnnnnnnnnnnnnnnnnnnnnnnnnnnnnnnnnnnnnnnnnnnnnnnnnnnnnnnnnnnnnnnnnnnnnnnnnnnnnnnnnnnnnnnnnnnnnnnnnnnnnnnnnnnnnnnnnnnnnnnnnnnnnnnnnnnnnnnnnnnnnnnnnnnnnnnnnnnnnnnnnnnnnnnnnnnnnnnnnnnnnnnnnnnnnnnnnnnnnnnnnnnnnnnnnnnnnnnnnnnnnnnnnnnnnnnnnnnnnnnnnnnnnnnnnnnnnnnnnnnnnnnnnnnnnnnnnnnnnnnnnnnnnnnnnnnnnnnnnnnnnnnnnnnnnnnnnnnnnnnnnnnnnnnnnnnnnnnnnnnnnnnnnnnnnnnnnnnnnnnnnnnnnnnnnnnnnnnnnnnnnnnnnnnnnnnnnnnnnnnnnnnnnnnnnnnnnnnnnnnnnnnnnnnnnnnnnnnnnnnnnnnnnnnnnnnnnnnnnnnnnnnnnnnnnnnnnnnnnnnnnnnnnnnnnnnnnnnnnnnnnnnnnnnnnnnnnnnnnnnnnnnnnnnnnnnnnnnnnnnnnnnnnnnnnnnnnnnnnnnnnnnnnnnnnnnnnnnnnnnnnnnnnnnnnnnnnnnnnnnnnnnnnnnnnnnnnnnnnnnnnnnnnnnnnnnnnnnnnnnnnnnnnnnnnnnnnnnnnnnnnnnnnnnnnnnnnnnnnnnnnnnnnnnnnnnnnnnnnnnnnnnnnnnnnnnnnnnnnnnnnnnnnnnnnnnnnnnnnnnnnnnnnnnnnnnnnnnnnnnnnnnnnnnnnnnnnnnnnnnnnnnnnnnnnnnnnnnnnnnnnnnnnnnnnnnnnnnnnnnnnnnnnnnnnnnnnnnnnnnnnnnnnnnnnnnnnnnnnnnnnnnnnnnnnnnnnnnnnnnnnnnnnnnnnnnnnnnnnnnnnnnnnnnnnnnnnnnnnnnnnnnnnnnnnnnnnnnnnnnnnnnnnnnnnnnnnnnnnnnnnnnnnnnnnnnnnnnnnnnnnnnnnnnnnnnnnnnnnnnnnnnnnnnnnnnnnnnnnnnnnnnnnnnnnnnnnnnnnnnnnnnnnnnnnnnnnnnnnnnnnnnnnnnnnnnnnnnnnnnnnnnnnnnnnnnnnnnnnnnnnnnnnnnnnnnnnnnnnnnnnnnnnnnnnnnnnnnnnnnnnnnnnnnnnnnnnnnnnnnnnnnnnnnnnnnnnnnnnnnnnnnnnnnnnnnnnnnnnnnnnnnnnnnnnnnnnnnnnnnnnnnnnnnnnnnnnnnnnnnnnnnnnnnnnnnnnnnnnnnnnnnnnnnnnnnnnnnnnnnnnnnnnnnnnnnnnnnnnnnnnnnnnnnnnnnnnnnnnnnnnnnnnnnnnnnnnnnnnnnnnnnnnnnnnnnnnnnnnnnnnnnnnnnnnnnnnnnnnnnnnnnnnnnnnnnnnnnnnnnnnnnnnnnnnnnnnnnnnnnnnnnnnnnnnnnnnnnnnnnnnnnnnnnnnnnnnnnnnnnnnnnnnnnnnnnnnnnnnnnnnnnnnnnnnnnnnnnnnnnnnnnnnnnnnnnnnnnnnnnnnnnnnnnnnnnnnnnnnnnnnnnnnnnnnnnnnnnnnnnnnnnnnnnnnnnnnnnnnnnnnnnnnnnnnnnnnnnnnnnnnnnnnnnnnnnnnnnnnnnnnnnnnnnnnnnnnnnnnnnnnnnnnnnnnnnnnnnnnnnnnnnnnnnnnnnnnnnnnnnnnnnnnnnnnnnnnnnnnnnnnnnnnnnnnnnnnnnnnnnnnnnnnnnnnnnnnnnnnnnnnnnnnnnnnnnnnnnnnnnnnnnnnnnnnnnnnnnnnnnnnnnnnnnnnnnnnnnnnnnnnnnnnnnnnnnnnnnnnnnnnnnnnnnnnnnnnnnnnnnnnnnnnnnnnnnnnnnnnnnnnnnnnnnnnnnnnnnnnnnnnnnnnnnnnnnnnnnnnnnnnnnnnnnnnnnnnnnnnnnnnnnnnnnnnnnnnnnnnnnnnnnnnnnnnnnnnnnnnnnnnnnnnnnnnnnnnnnnnnnnnnnnnnnnnnnnnnnnnnnnnnnnnnnnnnnnnnnnnnnnnnnnnnnnnnnnnnnnnnnnnnnnnnnnnnnnnnnnnnnnnnnnnnnnnnnnnnnnnnnnnnnnnnnnnnnnnnnnnnnnnnnnnnnnnnnnnnnnnnnnnnnnnnnnnnnnnnnnnnnnnnnnnnnnnnnnnnnnnnnnnnnnnnnnnnnnnnnnnnnnnnnnnnnnnnnnnnnnnnnnnnnnnnnnnnnnnnnnnnnnnnnnnnnnnnnnnnnnnnnnnnnnnnnnnnnnnnnnnnnnnnnnnnnnnnnnnnnnnnnnnnnnnnnnnnnnnnnnnnnnnnnnnnnnnnnnnnnnnnnnnnnnnnnnnnnnnnnnnnnnnnnnnnnnnnnnnnnnnnnnnnnnnnnnnnnnnnnnnnnnnnnnnnnnnnnnnnnnnnnnnnnnnnnnnnnnnnnnnnnnnnnnnnnnnnnnnnnnnnnnnnnnnnnnnnnnnnnnnnnnnnnnnnnnnnnnnnnnnnnnnnnnnnnnnnnnnnnnnnnnnnnnnnnnnnnnnnnnnnnnnnnnnnnnnnnnnnnnnnnnnnnnnnnnnnnnnnnnnnnnnnnnnnnnnnnnnnnnnnnnnnnnnnnnnnnnnnnnnnnnnnnnnnnnnnnnnnnnnnnnnnnnnnnnnnnnnnnnnnnnnnnnnnnnnnnnnnnnnnnnnnnnnnnnnnnnnnnnnnnnnnnnnnnnnnnnnnnnnnnnnnnnnnnnnnnnnnnnnnnnnnnnnnnnnnnnnnnnnnnnnnnnnnnnnnnnnnnnnnnnnnnnnnnnnnnnnnnnnnnnnnnnnnnnnnnnnnnnnnnnnnnnnnnnnnnnnnnnnnnnnnnnnnnnnnnnnnnnnnnnnnnnnnnnnnnnnnnnnnnnnnnnnnnnnnnnnnnnnnnnnnnnnnnnnnnnnnnnnnnnnnnnnnnnnnnnnnnnnnnnnnnnnnnnnnnnnnnnnnnnnnnnnnnnnnnnnnnnnnnnnnnnnnnnnnnnnnnnnnnnnnnnnnnnnnnnnnnnnnnnnnnnnnnnnnnnnnnnnnnnnnnnnnnnnnnnnnnnnnnnnnnnnnnnnnnnnnnnnnnnnnnnnnnnnnnnnnnnnnnnnnnnnnnnnnnnnnnnnnnnnnnnnnnnnnnnnnnnnnnnnnnnnnnnnnnnnnnnnnnnnnnnnnnnnnnnnnnnnnnnnnnnnnnnnnnnnnnnnnnnnnnnnnnnnnnnnnnnnnnnnnnnnnnnnnnnnnnnnnnnnnnnnnnnnnnnnnnnnnnnnnnnnnnnnnnnnnnnnnnnnnnnnnnnnnnnnnnnnnnnnnnnnnnnnnnnnnnnnnnnnnnnnnnnnnnnnnnnnnnnnnnnnnnnnnnnnnnnnnnnnnnnnnnnnnnnnnnnnnnnnnnnnnnnnnnnnnnnnnnnnnnnnnnnnnnnnnnnnnnnnnnnnnnnnnnnnnnnnnnnnnnnnnnnnnnnnnnnnnnnnnnnnnnnnnnnnnnnnnnnnnnnnnnnnnnnnnnnnnnnnnnnnnnnnnnnnnnnnnnnnnnnnnnnnnnnnnnnnnnnnnnnnnnnnnnnnnnnnnnnnnnnnnnnnnnnnnnnnnnnnnnnnnnnnnnnnnnnnnnnnnnnnnnnnnnnnnnnnnnnnnnnnnnnnnnnnnnnnnnnnnnnnnnnnnnnnnnnnnnnnnnnnnnnnnnnnnnnnnnnnnnnnnnnnnnnnnnnnnnnnnnnnnnnnnnnnnnnnnnnnnnnnnnnnnnnnnnnnnnnnnnnnnnnnnnnnnnnnnnnnnnnnnnnnnnnnnnnnnnnnnnnnnnnnnnnnnnnnnnnnnnnnnnnnnnnnnnnnnnnnnnnnnnnnnnnnnnnnnnnnnnnnnnnnnnnnnnnnnnnnnnnnnnnnnnnnnnnnnnnnnnnnnnnnnnnnnnnnnnnnnnnnnnnnnnnnnnnnnnnnnnnnnnnnnnnnnnnnnnnnnnnnnnnnnnnnnnnnnnnnnnnnnnnnnnnnnnnnnnnnnnnnnnnnnnnnnnnnnnnnnnnnnnnnnnnnnnnnnnnnnnnnnnnnnnnnnnnnnnnnnnnnnnnnnnnnnnnnnnnnnnnnnnnnnnnnnnnnnnnnnnnnnnnnnnnnnnnnnnnnnnnnnnnnnnnnnnnnnnnnnnnnnnnnnnnnnnnnnnnnnnnnnnnnnnnnnnnnnnnnnnnnnnnnnnnnnnnnnnnnnnnnnnnnnnnnnnnnnnnnnnnnnnnnnnnnnnnnnnnnnnnnnnnnnnnnnnnnnnnnnnnnnnnnnnnnnnnnnnnnnnnnnnnnnnnnnnnnnnnnnnnnnnnnnnnnnnnnnnnnnnnnnnnnnnnnnnnnnnnnnnnnnnnnnnnnnnnnnnnnnnnnnnnnnnnnnnnnnnnnnnnnnnnnnnnnnnnnnnnnnnnnnnnnnnnnnnnnnnnnnnnnnnnnnnnnnnnnnnnnnnnnnnnnnnnnnnnnnnnnnnnnnnnnnnnnnnnnnnnnnnnnnnnnnnnnnnnnnnnnnnnnnnnnnnnnnnnnnnnnnnnnnnnnnnnnnnnnnnnnnnnnnnnnnnnnnnnnnnnnnnnnnnnnnnnnnnnnnnnnnnnnnnnnnnnnnnnnnnnnnnnnnnnnnnnnnnnnnnnnnnnnnnnnnnnnnnnnnnnnnnnnnnnnnnnnnnnnnnnnnnnnnnnnnnnnnnnnnnnnnnnnnnnnnnnnnnnnnnnnnnnnnnnnnnnnnnnnnnnnnnnnnnnnnnnnnnnnnnnnnnnnnnnnnnnnnnnnnnnnnnnnnnnnnnnnnnnnnnnnnnnnnnnnnnnnnnnnnnnnnnnnnnnnnnnnnnnnnnnnnnnnnnnnnnnnnnnnnnnnnnnnnnnnnnnnnnnnnnnnnnnnnnnnnnnnnnnnnnnnnnnnnnnnnnnnnnnnnnnnnnnnnnnnnnnnnnnnnnnnnnnnnnnnnnnnnnnnnnnnnnnnnnnnnnnnnnnnnnnnnnnnnnnnnnnnnnnnnnnnnnnnnnnnnnnnnnnnnnnnnnnnnnnnnnnnnnnnnnnnnnnnnnnnnnnnnnnnnnnnnnnnnnnnnnnnnnnnnnnnnnnnnnnnnnnnnnnnnnnnnnnnnnnnnnnnnnnnnnnnnnnnnnnnnnnnnnnnnnnnnnnnnnnnnnnnnnnnnnnnnnnnnnnnnnnnnnnnnnnnnnnnnnnnnnnnnnnnnnnnnnnnnnnnnnnnnnnnnnnnnnnnnnnnnnnnnnnnnnnnnnnnnnnnnnnnnnnnnnnnnnnnnnnnnnnnnnnnnnnnnnnnnnnnnnnnnnnnnnnnnnnnnnnnnnnnnnnnnnnnnnnnnnnnnnnnnnnnnnnnnnnnnnnnnnnnnnnnnnnnnnnnnnnnnnnnnnnnnnnnnnnnnnnnnnnnnnnnnnnnnnnnnnnnnnnnnnnnnnnnnnnnnnnnnnnnnnnnnnnnnnnnnnnnnnnnnnnnnnnnnnnnnnnnnnnnnnnnnnnnnnnnnnnnnnnnnnnnnnnnnnnnnnnnnnnnnnnnnnnnnnnnnnnnnnnnnnnnnnnnnnnnnnnnnnnnnnnnnnnnnnnnnnnnnnnnnnnnnnnnnnnnnnnnnnnnnnnnnnnnnnnnnnnnnnnnnnnnnnnnnnnnnnnnnnnnnnnnnnnnnnnnnnnnnnnnnnnnnnnnnnnnnnnnnnnnnnnnnnnnnnnnnnnnnnnnnnnnnnnnnnnnnnnnnnnnnnnnnnnnnnnnnnnnnnnnnnnnnnnnnnnnnnnnnnnnnnnnnnnnnnnnnnnnnnnnnnnnnnnnnnnnnnnnnnnnnnnnnnnnnnnnnnnnnnnnnnnnnnnnnnnnnnnnnnnnnnnnnnnnnnnnnnnnnnnnnnnnnnnnnnnnnnnnnnnnnnnnnnnnnnnnnnnnnnnnnnnnnnnnnnnnnnnnnnnnnnnnnnnnnnnnnnnnnnnnnnnnnnnnnnnnnnnnnnnnnnnnnnnnnnnnnnnnnnnnnnnnnnnnnnnnnnnnnnnnnnnnnnnnnnnnnnnnnnnnnnnnnnnnnnnnnnnnnnnnnnnnnnnnnnnnnnnnnnnnnnnnnnnnnnnnnnnnnnnnnnnnnnnnnnnnnnnnnnnnnnnnnnnnnnnnnnnnnnnnnnnnnnnnnnnnnnnnnnnnnnnnnnnnnnnnnnnnnnnnnnnnnnnnnnnnnnnnnnnnnnnnnnnnnnnnnnnnnnnnnnnnnnnnnnnnnnnnnnnnnnnnnnnnnnnnnnnnnnnnnnnnnnnnnnnnnnnnnnnnnnnnnnnnnnnnnnnnnnnnnnnnnnnnnnnnnnnnnnnnnnnnnnnnnnnnnnnnnnnnnnnnnnnnnnnnnnnnnnnnnnnnnnnnnnnnnnnnnnnnnnnnnnnnnnnnnnnnnnnnnnnnnnnnnnnnnnnnnnnnnnnnnnnnnnnnnnnnnnnnnnnnnnnnnnnnnnnnnnnnnnnnnnnnnnnnnnnnnnnnnnnnnnnnnnnnnnnnnnnnnnnnnnnnnnnnnnnnnnnnnnnnnnnnnnnnnnnnnnnnnnnnnnnnnnnnnnnnnnnnnnnnnnnnnnnnnnnnnnnnnnnnnnnnnnnnnnnnnnnnnnnnnnnnnnnnnnnnnnnnnnnnnnnnnnnnnnnnnnnnnnnnnnnnnnnnnnnnnnnnnnnnnnnnnnnnnnnnnnnnnnnnnnnnnnnnnnnnnnnnnnnnnnnnnnnnnnnnnnnnnnnnnnnnnnnnnnnnnnnnnnnnnnnnnnnnnnnnnnnnnnnnnnnnnnnnnnnnnnnnnnnnnnnnnnnnnnnnnnnnnnnnnnnnnnnnnnnnnnnnnnnnnnnnnnnnnnnnnnnnnnnnnnnnnnnnnnnnnnnnnnnnnnnnnnnnnnnnnnnnnnnnnnnnnnnnnnnnnnnnnnnnnnnnnnnnnnnnnnnnnnnnnnnnnnnnnnnnnnnnnnnnnnnnnnnnnnnnnnnnnnnnnnnnnnnnnnnnnnnnnnnnnnnnnnnnnnnnnnnnnnnnnnnnnnnnnnnnnnnnnnnnnnnnnnnnnnnnnnnnnnnnnnnnnnnnnnnnnnnnnnnnnnnnnnnnnnnnnnnnnnnnnnnnnnnnnnnnnnnnnnnnnnnnnnnnnnnnnnnnnnnnnnnnnnnnnnnnnnnnnnnnnnnnnnnnnnnnnnnnnnnnnnnnnnnnnnnnnnnnnnnnnnnnnnnnnnnnnnnnnnnnnnnnnnnnnnnnnnnnnnnnnnnnnnnnnnnnnnnnnnnnnnnnnnnnnnnnnnnnnnnnnnnnnnnnnnnnnnnnnnnnnnnnnnnnnnnnnnnnnnnnnnnnnnnnnnnnnnnnnnnnnnnnnnnnnnnnnnnnnnnnnnnnnnnnnnnnnnnnnnnnnnnnnnnnnnnnnnnnnnnnnnnnnnnnnnnnnnnnnnnnnnnnnnnnnnnnnnnnnnnnnnnnnnnnnnnnnnnnnnnnnnnnnnnnnnnnnnnnnnnnnnnnnnnnnnnnnnnnnnnnnnnnnnnnnnnnnnnnnnnnnnnnnnnnnnnnnnnnnnnnnnnnnnnnnnnnnnnnnnnnnnnnnnnnnnnnnnnnnnnnnnnnnnnnnnnnnnnnnnnnnnnnnnnnnnnnnnnnnnnnnnnnnnnnnnnnnnnnnnnnnnnnnnnnnnnnnnnnnnnnnnnnnnnnnnnnnnnnnnnnnnnnnnnnnnnnnnnnnnnnnnnnnnnnnnnnnnnnnnnnnnnnnnnnnnnnnnnnnnnnnnnnnnnnnnnnnnnnnnnnnnnnnnnnnnnnnnnnnnnnnnnnnnnnnnnnnnnnnnnnnnnnnnnnnnnnnnnnnnnnnnnnnnnnnnnnnnnnnnnnnnnnnnnnnnnnnnnnnnnnnnnnnnnnnnnnnnnnnnnnnnnnnnnnnnnnnnnnnnnnnnnnnnnnnnnnnnnnnnnnnnnnnnnnnnnnnnnnnnnnnnnnnnnnnnnnnnnnnnnnnnnnnnnnnnnnnnnnnnnnnnnnnnnnnnnnnnnnnnnnnnnnnnnnnnnnnnnnnnnnnnnnnnnnnnnnnnnnnnnnnnnnnnnnnnnnnnnnnnnnnnnnnnnnnnnnnnnnnnnnnnnnnnnnnnnnnnnnnnnnnnnnnnnnnnnnnnnnnnnnnnnnnnnnnnnnnnnnnnnnnnnnnnnnnnnnnnnnnnnnnnnnnnnnnnnnnnnnnnnnnnnnnnnnnnnnnnnnnnnnnnnnnnnnnnnnnnnnnnnnnnnnnnnnnnnnnnnnnnnnnnnnnnnnnnnnnnnnnnnnnnnnnnnnnnnnnnnnnnnnnnnnnnnnnnnnnnnnnnnnnnnnnnnnnnnnnnnnnnnnnnnnnnnnnnnnnnnnnnnnnnnnnnnnnnnnnnnnnnnnnnnnnnnnnnnnnnnnnnnnnnnnnnnnnnnnnnnnnnnnnnnnnnnnnnnnnnnnnnnnnnnnnnnnnnnnnnnnnnnnnnnnnnnnnnnnnnnnnnnnnnnnnnnnnnnnnnnnnnnnnnnnnnnnnnnnnnnnnnnnnnnnnnnnnnnnnnnnnnnnnnnnnnnnnnnnnnnnnnnnnnnnnnnnnnnnnnnnnnnnnnnnnnnnnnnnnnnnnnnnnnnnnnnnnnnnnnnnnnnnnnnnnnnnnnnnnnnnnnnnnnnnnnnnnnnnnnnnnnnnnnnnnnnnnnnnnnnnnnnnnnnnnnnnnnnnnnnnnnnnnnnnnnnnnnnnnnnnnnnnnnnnnnnnnnnnnnnnnnnnnnnnnnnnnnnnnnnnnnnnnnnnnnnnnnnnnnnnnnnnnnnnnnnnnnnnnnnnnnnnnnnnnnnnnnnnnnnnnnnnnnnnnnnnnnnnnnnnnnnnnnnnnnnnnnnnnnnnnnnnnnnnnnnnnnnnnnnnnnnnnnnnnnnnnnnnnnnnnnnnnnnnnnnnnnnnnnnnnnnnnnnnnnnnnnnnnnnnnnnnnnnnnnnnnnnnnnnnnnnnnnnnnnnnnnnnnnnnnnnnnnnnnnnnnnnnnnnnnnnnnnnnnnnnnnnnnnnnnnnnnnnnnnnnnnnnnnnnnnnnnnnnnnnnnnnnnnnnnnnnnnnnnnnnnnnnnnnnnnnnnnnnnnnnnnnnnnnnnnnnnnnnnnnnnnnnnnnnnnnnnnnnnnnnnnnnnnnnnnnnnnnnnnnnnnnnnnnnnnnnnnnnnnnnnnnnnnnnnnnnnnnnnnnnnnnnnnnnnnnnnnnnnnnnnnnnnnnnnnnnnnnnnnnnnnnnnnnnnnnnnnnnnnnnnnnnnnnnnnnnnnnnnnnnnnnnnnnnnnnnnnnnnnnnnnnnnnnnnnnnnnnnnnnnnnnnnnnnnnnnnnnnnnnnnnnnnnnnnnnnnnnnnnnnnnnnnnnnnnnnnnnnnnnnnnnnnnnnnnnnnnnnnnnnnnnnnnnnnnnnnnnnnnnnnnnnnnnnnnnnnnnnnnnnnnnnnnnnnnnnnnnnnnnnnnnnnnnnnnnnnnnnnnnnnnnnnnnnnnnnnnnnnnnnnnnnnnnnnnnnnnnnnnnnnnnnnnnnnnnnnnnnnnnnnnnnnnnnnnnnnnnnnnnnnnnnnnnnnnnnnnnnnnnnnnnnnnnnnnnnnnnnnnnnnnnnnnnnnnnnnnnnnnnnnnnnnnnnnnnnnnnnnnnnnnnnnnnnnnnnnnnnnnnnnnnnnnnnnnnnnnnnnnnnnnnnnnnnnnnnnnnnnnnnnnnnnnnnnnnnnnnnnnnnnnnnnnnnnnnnnnnnnnnnnnnnnnnnnnnnnnnnnnnnnnnnnnnnnnnnnnnnnnnnnnnnnnnnnnnnnnnnnnnnnnnnnnnnnnnnnnnnnnnnnnnnnnnnnnnnnnnnnnnnnnnnnnnnnnnnnnnnnnnnnnnnnnnnnnnnnnnnnnnnnnnnnnnnnnnnnnnnnnnnnnnnnnnnnnnnnnnnnnnnnnnnnnnnnnnnnnnnnnnnnnnnnnnnnnnnnnnnnnnnnnnnnnnnnnnnnnnnnnnnnnnnnnnnnnnnnnnnnnnnnnnnnnnnnnnnnnnnnnnnnnnnnnnnnnnnnnnnnnnnnnnnnnnnnnnnnnnnnnnnnnnnnnnnnnnnnnnnnnnnnnnnnnnnnnnnnnnnnnnnnnnnnnnnnnnnnnnnnnnnnnnnnnnnnnnnnnnnnnnnnnnnnnnnnnnnnnnnnnnnnnnnnnnnnnnnnnnnnnnnnnnnnnnnnnnnnnnnnnnnnnnnnnnnnnnnnnnnnnnnnnnnnnnnnnnnnnnnnnnnnnnnnnnnnnnnnnnnnnnnnnnnnnnnnnnnnnnnnnnnnnnnnnnnnnnnnnnnnnnnnnnnnnnnnnnnnnnnnnnnnnnnnnnnnnnnnnnnnnnnnnnnnnnnnnnnnnnnnnnnnnnnnnnnnnnnnnnnnnnnnnnnnnnnnnnnnnnnnnnnnnnnnnnnnnnnnnnnnnnnnnnnnnnnnnnnnnnnnnnnnnnnnnnnnnnnnnnnnnnnnnnnnnnnnnnnnnnnnnnnnnnnnnnnnnnnnnnnnnnnnnnnnnnnnnnnnnnnnnnnnnnnnnnnnnnnnnnnnnnnnnnnnnnnnnnnnnnnnnnnnnnnnnnnnnnnnnnnnnnnnnnnnnnnnnnnnnnnnnnnnnnnnnnnnnnnnnnnnnnnnnnnnnnnnnnnnnnnnnnnnnnnnnnnnnnnnnnnnnnnnnnnnnnnnnnnnnnnnnnnnnnnnnnnnnnnnnnnnnnnnnnnnnnnnnnnnnnnnnnnnnnnnnnnnnnnnnnnnnnnnnnnnnnnnnnnnnnnnnnnnnnnnnnnnnnnnnnnnnnnnnnnnnnnnnnnnnnnnnnnnnnnnnnnnnnnnnnnnnnnnnnnnnnnnnnnnnnnnnnnnnnnnnnnnnnnnnnnnnnnnnnnnnnnnnnnnnnnnnnnnnnnnnnnnnnnnnnnnnnnnnnnnnnnnnnnnnnnnnnnnnnnnnnnnnnnnnnnnnnnnnnnnnnnnnnnnnnnnnnnnnnnnnnnnnnnnnnnnnnnnnnnnnnnnnnnnnnnnnnnnnnnnnnnnnnnnnnnnnnnnnnnnnnnnnnnnnnnnnnnnnnnnnnnnnnnnnnnnnnnnnnnnnnnnnnnnnnnnnnnnnnnnnnnnnnnnnnnnnnnnnnnnnnnnnnnnnnnnnnnnnnnnnnnnnnnnnnnnnnnnnnnnnnnnnnnnnnnnnnnnnnnnnnnnnnnnnnnnnnnnnnnnnnnnnnnnnnnnnnnnnnnnnnnnnnnnnnnnnnnnnnnnnnnnnnnnnnnnnnnnnnnnnnnnnnnnnnnnnnnnnnnnnnnnnnnnnnnnnnnnnnnnnnnnnnnnnnnnnnnnnnnnnnnnnnnnnnnnnnnnnnnnnnnnnnnnnnnnnnnnnnnnnnnnnnnnnnnnnnnnnnnnnnnnnnnnnnnnnnnnnnnnnnnnnnnnnnnnnnnnnnnnnnnnnnnnnnnnnnnnnnnnnnnnnnnnnnnnnnnnnnnnnnnnnnnnnnnnnnnnnnnnnnnnnnnnnnnnnnnnnnnnnnnnnnnnnnnnnnnnnnnnnnnnnnnnnnnnnnnnnnnnnnnnnnnnnnnnnnnnnnnnnnnnnnnnnnnnnnnnnnnnnnnnnnnnnnnnnnnnnnnnnnnnnnnnnnnnnnnnnnnnnnnnnnnnnnnnnnnnnnnnnnnnnnnnnnnnnnnnnnnnnnnnnnnnnnnnnnnnnnnnnnnnnnnnnnnnnnnnnnnnnnnnnnnnnnnnnnnnnnnnnnnnnnnnnnnnnnnnnnnnnnnnnnnnnnnnnnnnnnnnnnnnnnnnnnnnnnnnnnnnnnnnnnnnnnnnnnnnnnnnnnnnnnnnnnnnnnnnnnnnnnnnnnnnnnnnnnnnnnnnnnnnnnnnnnnnnnnnnnnnnnnnnnnnnnnnnnnnnnnnnnnnnnnnnnnnnnnnnnnnnnnnnnnnnnnnnnnnnnnnnnnnnnnnnnnnnnnnnnnnnnnnnnnnnnnnnnnnnnnnnnnnnnnnnnnnnnnnnnnnnnnnnnnnnnnnnnnnnnnnnnnnnnnnnnnnnnnnnnnnnnnnnnnnnnnnnnnnnnnnnnnnnnnnnnnnnnnnnnnnnnnnnnnnnnnnnnnnnnnnnnnnnnnnnnnnnnnnnnnnnnnnnnnnnnnnnnnnnnnnnnnnnnnnnnnnnnnnnnnnnnnnnnnnnnnnnnnnnnnnnnnnnnnnnnnnnnnnnnnnnnnnnnnnnnnnnnnnnnnnnnnnnnnnnnnnnnnnnnnnnnnnnnnnnnnnnnnnnnnnnnnnnnnnnnnnnnnnnnnnnnnnnnnnnnnnnnnnnnnnnnnnnnnnnnnnnnnnnnnnnnnnnnnnnnnnnnnnnnnnnnnnnnnnnnnnnnnnnnnnnnnnnnnnnnnnnnnnnnnnnnnnnnnnnnnnnnnnnnnnnnnnnnnnnnnnnnnnnnnnnnnnnnnnnnnnnnnnnnnnnnnnnnnnnnnnnnnnnnnnnnnnnnnnnnnnnnnnnnnnnnnnnnnnnnnnnnnnnnnnnnnnnnnnnnnnnnnnnnnnnnnnnnnnnnnnnnnnnnnnnnnnnnnnnnnnnnnnnnnnnnnnnnnnnnnnnnnnnnnnnnnnnnnnnnnnnnnnnnnnnnnnnnnnnnnnnnnnnnnnnnnnnnnnnnnnnnnnnnnnnnnnnnnnnnnnnnnnnnnnnnnnnnnnnnnnnnnnnnnnnnnnnnnnnnnnnnnnnnnnnnnnnnnnnnnnnnnnnnnnnnnnnnnnnnnnnnnnnnnnnnnnnnnnnnnnnnnnnnnnnnnnnnnnnnnnnnnnnnnnnnnnnnnnnnnnnnnnnnnnnnnnnnnnnnnnnnnnnnnnnnnnnnnnnnnnnnnnnnnnnnnnnnnnnnnnnnnnnnnnnnnnnnnnnnnnnnnnnnnnnnnnnnnnnnnnnnnnnnnnnnnnnnnnnnnnnnnnnnnnnnnnnnnnnnnnnnnnnnnnnnnnnnnnnnnnnnnnnnnnnnnnnnnnnnnnnnnnnnnnnnnnnnnnnnnnnnnnnnnnnnnnnnnnnnnnnnnnnnnnnnnnnnnnnnnnnnnnnnnnnnnnnnnnnnnnnnnnnnnnnnnnnnnnnnnnnnnnnnnnnnnnnnnnnnnnnnnnnnnnnnnnnnnnnnnnnnnnnnnnnnnnnnnnnnnnnnnnnnnnnnnnnnnnnnnnnnnnnnnnnnnnnnnnnnnnnnnnnnnnnnnnnnnnnnnnnnnnnnnnnnnnnnnnnnnnnnnnnnnnnnnnnnnnnnnnnnnnnnnnnnnnnnnnnnnnnnnnnnnnnnnnnnnnnnnnnnnnnnnnnnnnnnnnnnnnnnnnnnnnnnnnnnnnnnnnnnnnnnnnnnnnnnnnnnnnnnnnnnnnnnnnnnnnnnnnnnnnnnnnnnnnnnnnnnnnnnnnnnnnnnnnnnnnnnnnnnnnnnnnnnnnnnnnnnnnnnnnnnnnnnnnnnnnnnnnnnnnnnnnnnnnnnnnnnnnnnnnnnnnnnnnnnnnnnnnnnnnnnnnnnnnnnnnnnnnnnnnnnnnnnnnnnnnnnnnnnnnnnnnnnnnnnnnnnnnnnnnnnnnnnnnnnnnnnnnnnnnnnnnnnnnnnnnnnnnnnnnnnnnnnnnnnnnnnnnnnnnnnnnnnnnnnnnnnnnnnnnnnnnnnnnnnnnnnnnnnnnnnnnnnnnnnnnnnnnnnnnnnnnnnnnnnnnnnnnnnnnnnnnnnnnnnnnnnnnnnnnnnnnnnnnnnnnnnnnnnnnnnnnnnnnnnnnnnnnnnnnnnnnnnnnnnnnnnnnnnnnnnnnnnnnnnnnnnnnnnnnnnnnnnnnnnnnnnnnnnnnnnnnnnnnnnnnnnnnnnnnnnnnnnnnnnnnnnnnnnnnnnnnnnnnnnnnnnnnnnnnnnnnnnnnnnnnnnnnnnnnnnnnnnnnnnnnnnnnnnnnnnnnnnnnnnnnnnnnnnnnnnnnnnnnnnnnnnnnnnnnnnnnnnnnnnnnnnnnnnnnnnnnnnnnnnnnnnnnnnnnnnnnnnnnnnnnnnnnnnnnnnnnnnnnnnnnnnnnnnnnnnnnnnnnnnnnnnnnnnnnnnnnnnnnnnnnnnnnnnnnnnnnnnnnnnnnnnnnnnnnnnnnnnnnnnnnnnnnnnnnnnnnnnnnnnnnnnnnnnnnnnnnnnnnnnnnnnnnnnnnnnnnnnnnnnnnnnnnnnnnnnnnnnnnnnnnnnnnnnnnnnnnnnnnnnnnnnnnnnnnnnnnnnnnnnnnnnnnnnnnnnnnnnnnnnnnnnnnnnnnnnnnnnnnnnnnnnnnnnnnnnnnnnnnnnnnnnnnnnnnnnnnnnnnnnnnnnnnnnnnnnnnnnnnnnnnnnnnnnnnnnnnnnnnnnnnnnnnnnnnnnnnnnnnnnnnnnnnnnnnnnnnnnnnnnnnnnnnnnnnnnnnnnnnnnnnnnnnnnnnnnnnnnnnnnnnnnnnnnnnnnnnnnnnnnnnnnnnnnnnnnnnnnnnnnnnnnnnnnnnnnnnnnnnnnnnnnnnnnnnnnnnnnnnnnnnnnnnnnnnnnnnnnnnnnnnnnnnnnnnnnnnnnnnnnnnnnnnnnnnnnnnnnnnnnnnnnnnnnnnnnnnnnnnnnnnnnnnnnnnnnnnnnnnnnnnnnnnnnnnnnnnnnnnnnnnnnnnnnnnnnnnnnnnnnnnnnnnnnnnnnnnnnnnnnnnnnnnnnnnnnnnnnnnnnnnnnnnnnnnnnnnnnnnnnnnnnnnnnnnnnnnnnnnnnnnnnnnnnnnnnnnnnnnnnnnnnnnnnnnnnnnnnnnnnnnnnnnnnnnnnnnnnnnnnnnnnnnnnnnnnnnnnnnnnnnnnnnnnnnnnnnnnnnnnnnnnnnnnnnnnnnnnnnnnnnnnnnnnnnnnnnnnnnnnnnnnnnnnnnnnnnnnnnnnnnnnnnnnnnnnnnnnnnnnnnnnnnnnnnnnnnnnnnnnnnnnnnnnnnnnnnnnnnnnnnnnnnnnnnnnnnnnnnnnnnnnnnnnnnnnnnnnnnnnnnnnnnnnnnnnnnnnnnnnnnnnnnnnnnnnnnnnnnnnnnnnnnnnnnnnnnnnnnnnnnnnnnnnnnnnnnnnnnnnnnnnnnnnnnnnnnnnnnnnnnnnnnnnnnnnnnnnnnnnnnnnnnnnnnnnnnnnnnnnnnnnnnnnnnnnnnnnnnnnnnnnnnnnnnnnnnnnnnnnnnnnnnnnnnnnnnnnnnnnnnnnnnnnnnnnnnnnnnnnnnnnnnnnnnnnnnnnnnnnnnnnnnnnnnnnnnnnnnnnnnnnnnnnnnnnnnnnnnnnnnnnnnnnnnnnnnnnnnnnnnnnnnnnnnnnnnnnnnnnnnnnnnnnnnnnnnnnnnnnnnnnnnnnnnnnnnnnnnnnnnnnnnnnnnnnnnnnnnnnnnnnnnnnnnnnnnnnnnnnnnnnnnnnnnnnnnnnnnnnnnnnnnnnnnnnnnnnnnnnnnnnnnnnnnnnnnnnnnnnnnnnnnnnnnnnnnnnnnnnnnnnnnnnnnnnnnnnnnnnnnnnnnnnnnnnnnnnnnnnnnnnnnnnnnnnnnnnnnnnnnnnnnnnnnnnnnnnnnnnnnnnnnnnnnnnnnnnnnnnnnnnnnnnnnnnnnnnnnnnnnnnnnnnnnnnnnnnnnnnnnnnnnnnnnnnnnnnnnnnnnnnnnnnnnnnnnnnnnnnnnnnnnnnnnnnnnnnnnnnnnnnnnnnnnnnnnnnnnnnnnnnnnnnnnnnnnnnnnnnnnnnnnnnnnnnnnnnnnnnnnnnnnnnnnnnnnnnnnnnnnnnnnnnnnnnnnnnnnnnnnnnnnnnnnnnnnnnnnnnnnnnnnnnnnnnnnnnnnnnnnnnnnnnnnnnnnnnnnnnnnnnnnnnnnnnnnnnnnnnnnnnnnnnnnnnnnnnnnnnnnnnnnnnnnnnnnnnnnnnnnnnnnnnnnnnnnnnnnnnnnnnnnnnnnnnnnnnnnnnnnnnnnnnnnnnnnnnnnnnnnnnnnnnnnnnnnnnnnnnnnnnnnnnnnnnnnnnnnnnnnnnnnnnnnnnnnnnnnnnnnnnnnnnnnnnnnnnnnnnnnnnnnnnnnnnnnnnnnnnnnnnnnnnnnnnnnnnnnnnnnnnnnnnnnnnnnnnnnnnnnnnnnnnnnnnnnnnnnnnnnnnnnnnnnnnnnnnnnnnnnnnnnnnnnnnnnnnnnnnnnnnnnnnnnnnnnnnnnnnnnnnnnnnnnnnnnnnnnnnnnnnnnnnnnnnnnnnnnnnnnnnnnnnnnnnnnnnnnnnnnnnnnnnnnnnnnnnnnnnnnnnnnnnnnnnnnnnnnnnnnnnnnnnnnnnnnnnnnnnnnnnnnnnnnnnnnnnnnnnnnnnnnnnnnnnnnnnnnnnnnnnnnnnnnnnnnnnnnnnnnnnnnnnnnnnnnnnnnnnnnnnnnnnnnnnnnnnnnnnnnnnnnnnnnnnnnnnnnnnnnnnnnnnnnnnnnnnnnnnnnnnnnnnnnnnnnnnnnnnnnnnnnnnnnnnnnnnnnnnnnnnnnnnnnnnnnnnnnnnnnnnnnnnnnnnnnnnnnnnnnnnnnnnnnnnnnnnnnnnnnnnnnnnnnnnnnnnnnnnnnnnnnnnnnnnnnnnnnnnnnnnnnnnnnnnnnnnnnnnnnnnnnnnnnnnnnnnnnnnnnnnnnnnnnnnnnnnnnnnnnnnnnnnnnnnnnnnnnnnnnnnnnnnnnnnnnnnnnnnnnnnnnnnnnnnnnnnnnnnnnnnnnnnnnnnnnnnnnnnnnnnnnnnnnnnnnnnnnnnnnnnnnnnnnnnnnnnnnnnnnnnnnnnnnnnnnnnnnnnnnnnnnnnnnnnnnnnnnnnnnnnnnnnnnnnnnnnnnnnnnnnnnnnnnnnnnnnnnnnnnnnnnnnnnnnnnnnnnnnnnnnnnnnnnnnnnnnnnnnnnnnnnnnnnnnnnnnnnnnnnnnnnnnnnnnnnnnnnnnnnnnnnnnnnnnnnnnnnnnnnnnnnnnnnnnnnnnnnnnnnnnnnnnnnnnnnnnnnnnnnnnnnnnnnnnnnnnnnnnnnnnnnnnnnnnnnnnnnnnnnnnnnnnnnnnnnnnnnnnnnnnnnnnnnnnnnnnnnnnnnnnnnnnnnnnnnnnnnnnnnnnnnnnnnnnnnnnnnnnnnnnnnnnnnnnnnnnnnnnnnnnnnnnnnnnnnnnnnnnnnnnnnnnnnnnnnnnnnnnnnnnnnnnnnnnnnnnnnnnnnnnnnnnnnnnnnnnnnnnnnnnnnnnnnnnnnnnnnnnnnnnnnnnnnnnnnnnnnnnnnnnnnnnnnnnnnnnnnnnnnnnnnnnnnnnnnnnnnnnnnnnnnnnnnnnnnnnnnnnnnnnnnnnnnnnnnnnnnnnnnnnnnnnnnnnnnnnnnnnnnnnnnnnnnnnnnnnnnnnnnnnnnnnnnnnnnnnnnnnnnnnnnnnnnnnnnnnnnnnnnnnnnnnnnnnnnnnnnnnnnnnnnnnnnnnnnnnnnnnnnnnnnnnnnnnnnnnnnnnnnnnnnnnnnnnnnnnnnnnnnnnnnnnnnnnnnnnnnnnnnnnnnnnnnnnnnnnnnnnnnnnnnnnnnnnnnnnnnnnnnnnnnnnnnnnnnnnnnnnnnnnnnnnnnnnnnnnnnnnnnnnnnnnnnnnnnnnnnnnnnnnnnnnnnnnnnnnnnnnnnnnnnnnnnnnnnnnnnnnnnnnnnnnnnnnnnnnnnnnnnnnnnnnnnnnnnnnnnnnnnnnnnnnnnnnnnnnnnnnnnnnnnnnnnnnnnnnnnnnnnnnnnnnnnnnnnnnnnnnnnnnnnnnnnnnnnnnnnnnnnnnnnnnnnnnnnnnnnnnnnnnnnnnnnnnnnnnnnnnnnnnnnnnnnnnnnnnnnnnnnnnnnnnnnnnnnnnnnnnnnnnnnnnnnnnnnnnnnnnnnnnnnnnnnnnnnnnnnnnnnnnnnnnnnnnnnnnnnnnnnnnnnnnnnnnnnnnnnnnnnnnnnnnnnnnnnnnnnnnnnnnnnnnnnnnnnnnnnnnnnnnnnnnnnnnnnnnnnnnnnnnnnnnnnnnnnnnnnnnnnnnnnnnnnnnnnnnnnnnnnnnnnnnnnnnnnnnnnnnnnnnnnnnnnnnnnnnnnnnnnnnnnnnnnnnnnnnnnnnnnnnnnnnnnnnnnnnnnnnnnnnnnnnnnnnnnnnnnnnnnnnnnnnnnnnnnnnnnnnnnnnnnnnnnnnnnnnnnnnnnnnnnnnnnnnnnnnnnnnnnnnnnnnnnnnnnnnnnnnnnnnnnnnnnnnnnnnnnnnnnnnnnnnnnnnnnnnnnnnnnnnnnnnnnnnnnnnnnnnnnnnnnnnnnnnnnnnnnnnnnnnnnnnnnnnnnnnnnnnnnnnnnnnnnnnnnnnnnnnnnnnnnnnnnnnnnnnnnnnnnnnnnnnnnnnnnnnnnnnnnnnnnnnnnnnnnnnnnnnnnnnnnnnnnnnnnnnnnnnnnnnnnnnnnnnnnnnnnnnnnnnnnnnnnnnnnnnnnnnnnnnnnnnnnnnnnnnnnnnnnnnnnnnnnnnnnnnnnnnnnnnnnnnnnnnnnnnnnnnnnnnnnnnnnnnnnnnnnnnnnnnnnnnnnnnnnnnnnnnnnnnnnnnnnnnnnnnnnnnnnnnnnnnnnnnnnnnnnnnnnnnnnnnnnnnnnnnnnnnnnnnnnnnnnnnnnnnnnnnnnnnnnnnnnnnnnnnnnnnnnnnnnnnnnnnnnnnnnnnnnnnnnnnnnnnnnnnnnnnnnnnnnnnnnnnnnnnnnnnnnnnnnnnnnnnnnnnnnnnnnnnnnnnnnnnnnnnnnnnnnnnnnnnnnnnnnnnnnnnnnnnnnnnnnnnnnnnnnnnnnnnnnnnnnnnnnnnnnnnnnnnnnnnnnnnnnnnnnnnnnnnnnnnnnnnnnnnnnnnnnnnnnnnnnnnnnnnnnnnnnnnnnnnnnnnnnnnnnnnnnnnnnnnnnnnnnnnnnnnnnnnnnnnnnnnnnnnnnnnnnnnnnnnnnnnnnnnnnnnnnnnnnnnnnnnnnnnnnnnnnnnnnnnnnnnnnnnnnnnnnnnnnnnnnnnnnnnnnnnnnnnnnnnnnnnnnnnnnnnnnnnnnnnnnnnnnnnnnnnnnnnnnnnnnnnnnnnnnnnnnnnnnnnnnnnnnnnnnnnnnnnnnnnnnnnnnnnnnnnnnnnnnnnnnnnnnnnnnnnnnnnnnnnnnnnnnnnnnnnnnnnnnnnnnnnnnnnnnnnnnnnnnnnnnnnnnnnnnnnnnnnnnnnnnnnnnnnnnnnnnnnnnnnnnnnnnnnnnnnnnnnnnnnnnnnnnnnnnnnnnnnnnnnnnnnnnnnnnnnnnnnnnnnnnnnnnnnnnnnnnnnnnnnnnnnnnnnnnnnnnnnnnnnnnnnnnnnnnnnnnnnnnnnnnnnnnnnnnnnnnnnnnnnnnnnnnnnnnnnnnnnnnnnnnnnnnnnnnnnnnnnnnnnnnnnnnnnnnnnnnnnnnnnnnnnnnnnnnnnnnnnnnnnnnnnnnnnnnnnnnnnnnnnnnnnnnnnnnnnnnnnnnnnnnnnnnnnnnnnnnnnnnnnnnnnnnnnnnnnnnnnnnnnnnnnnnnnnnnnnnnnnnnnnnnnnnnnnnnnnnnnnnnnnnnnnnnnnnnnnnnnnnnnnnnnnnnnnnnnnnnnnnnnnnnnnnnnnnnnnnnnnnnnnnnnnnnnnnnnnnnnnnnnnnnnnnnnnnnnnnnnnnnnnnnnnnnnnnnnnnnnnnnnnnnnnnnnnnnnnnnnnnnnnnnnnnnnnnnnnnnnnnnnnnnnnnnnnnnnnnnnnnnnnnnnnnnnnnnnnnnnnnnnnnnnnnnnnnnnnnnnnnnnnnnnnnnnnnnnnnnnnnnnnnnnnnnnnnnnnnnnnnnnnnnnnnnnnnnnnnnnnnnnnnnnnnnnnnnnnnnnnnnnnnnnnnnnnnnnnnnnnnnnnnnnnnnnnnnnnnnnnnnnnnnnnnnnnnnnnnnnnnnnnnnnnnnnnnnnnnnnnnnnnnnnnnnnnnnnnnnnnnnnnnnnnnnnnnnnnnnnnnnnnnnnnnnnnnnnnnnnnnnnnnnnnnnnnnnnnnnnnnnnnnnnnnnnnnnnnnnnnnnnnnnnnnnnnnnnnnnnnnnnnnnnnnnnnnnnnnnnnnnnnnnnnnnnnnnnnnnnnnnnnnnnnnnnnnnnnnnnnnnnnnnnnnnnnnnnnnnnnnnnnnnnnnnnnnnnnnnnnnnnnnnnnnnnnnnnnnnnnnnnnnnnnnnnnnnnnnnnnnnnnnnnnnnnnnnnnnnnnnnnnnnnnnnnnnnnnnnnnnnnnnnnnnnnnnnnnnnnnnnnnnnnnnnnnnnnnnnnnnnnnnnnnnnnnnnnnnnnnnnnnnnnnnnnnnnnnnnnnnnnnnnnnnnnnnnnnnnnnnnnnnnnnnnnnnnnnnnnnnnnnnnnnnnnnnnnnnnnnnnnnnnnnnnnnnnnnnnnnnnnnnnnnnnnnnnnnnnnnnnnnnnnnnnnnnnnnnnnnnnnnnnnnnnnnnnnnnnnnnnnnnnnnnnnnnnnnnnnnnnnnnnnnnnnnnnnnnnnnnnnnnnnnnnnnnnnnnnnnnnnnnnnnnnnnnnnnnnnnnnnnnnnnnnnnnnnnnnnnnnnnnnnnnnnnnnnnnnnnnnnnnnnnnnnnnnnnnnnnnnnnnnnnnnnnnnnnnnnnnnnnnnnnnnnnnnnnnnnnnnnnnnnnnnnnnnnnnnnnnnnnnnnnnnnnnnnnnnnnnnnnnnnnnnnnnnnnnnnnnnnnnnnnnnnnnnnnnnnnnnnnnnnnnnnnnnnnnnnnnnnnnnnnnnnnnnnnnnnnnnnnnnnnnnnnnnnnnnnnnnnnnnnnnnnnnnnnnnnnnnnnnnnnnnnnnnnnnnnnnnnnnnnnnnnnnnnnnnnnnnnnnnnnnnnnnnnnnnnnnnnnnnnnnnnnnnnnnnnnnnnnnnnnnnnnnnnnnnnnnnnnnnnnnnnnnnnnnnnnnnnnnnnnnnnnnnnnnnnnnnnnnnnnnnnnnnnnnnnnnnnnnnnnnnnnnnnnnnnnnnnnnnnnnnnnnnnnnnnnnnnnnnnnnnnnnnnnnnnnnnnnnnnnnnnnnnnnnnnnnnnnnnnnnnnnnnnnnnnnnnnnnnnnnnnnnnnnnnnnnnnnnnnnnnnnnnnnnnnnnnnnnnnnnnnnnnnnnnnnnnnnnnnnnnnnnnnnnnnnnnnnnnnnnnnnnnnnnnnnnnnnnnnnnnnnnnnnnnnnnnnnnnnnnnnnnnnnnnnnnnnnnnnnnnnnnnnnnnnnnnnnnnnnnnnnnnnnnnnnnnnnnnnnnnnnnnnnnnnnnnnnnnnnnnnnnnnnnnnnnnnnnnnnnnnnnnnnnnnnnnnnnnnnnnnnnnnnnnnnnnnnnnnnnnnnnnnnnnnnnnnnnnnnnnnnnnnnnnnnnnnnnnnnnnnnnnnnnnnnnnnnnnnnnnnnnnnnnnnnnnnnnnnnnnnnnnnnnnnnnnnnnnnnnnnnnnnnnnnnnnnnnnnnnnnnnnnnnnnnnnnnnnnnnnnnnnnnnnnnnnnnnnnnnnnnnnnnnnnnnnnnnnnnnnnnnnnnnnnnnnnnnnnnnnnnnnnnnnnnnnnnnnnnnnnnnnnnnnnnnnnnnnnnnnnnnnnnnnnnnnnnnnnnnnnnnnnnnnnnnnnnnnnnnnnnnnnnnnnnnnnnnnnnnnnnnnnnnnnnnnnnnnnnnnnnnnnnnnnnnnnnnnnnnnnnnnnnnnnnnnnnnnnnnnnnnnnnnnnnnnnnnnnnnnnnnnnnnnnnnnnnnnnnnnnnnnnnnnnnnnnnnnnnnnnnnnnnnnnnnnnnnnnnnnnnnnnnnnnnnnnnnnnnnnnnnnnnnnnnnnnnnnnnnnnnnnnnnnnnnnnnnnnnnnnnnnnnnnnnnnnnnnnnnnnnnnnnnnnnnnnnnnnnnnnnnnnnnnnnnnnnnnnnnnnnnnnnnnnnnnnnnnnnnnnnnnnnnnnnnnnnnnnnnnnnnnnnnnnnnnnnnnnnnnnnnnnnnnnnnnnnnnnnnnnnnnnnnnnnnnnnnnnnnnnnnnnnnnnnnnnnnnnnnnnnnnnnnnnnnnnnnnnnnnnnnnnnnnnnnnnnnnnnnnnnnnnnnnnnnnnnnnnnnnnnnnnnnnnnnnnnnnnnnnnnnnnnnnnnnnnnnnnnnnnnnnnnnnnnnnnnnnnnnnnnnnnnnnnnnnnnnnnnnnnnnnnnnnnnnnnnnnnnnnnnnnnnnnnnnnnnnnnnnnnnnnnnnnnnnnnnnnnnnnnnnnnnnnnnnnnnnnnnnnnnnnnnnnnnnnnnnnnnnnnnnnnnnnnnnnnnnnnnnnnnnnnnnnnnnnnnnnnnnnnnnnnnnnnnnnnnnnnnnnnnnnnnnnnnnnnnnnnnnnnnnnnnnnnnnnnnnnnnnnnnnnnnnnnnnnnnnnnnnnnnnnnnnnnnnnnnnnnnnnnnnnnnnnnnnnnnnnnnnnnnnnnnnnnnnnnnnnnnnnnnnnnnnnnnnnnnnnnnnnnnnnnnnnnnnnnnnnnnnnnnnnnnnnnnnnnnnnnnnnnnnnnnnnnnnnnnnnnnnnnnnnnnnnnnnnnnnnnnnnnnnnnnnnnnnnnnnnnnnnnnnnnnnnnnnnnnnnnnnnnnnnnnnnnnnnnnnnnnnnnnnnnnnnnnnnnnnnnnnnnnnnnnnnnnnnnnnnnnnnnnnnnnnnnnnnnnnnnnnnnnnnnnnnnnnnnnnnnnnnnnnnnnnnnnnnnnnnnnnnnnnnnnnnnnnnnnnnnnnnnnnnnnnnnnnnnnnnnnnnnnnnnnnnnnnnnnnnnnnnnnnnnnnnnnnnnnnnnnnnnnnnnnnnnnnnnnnnnnnnnnnnnnnnnnnnnnnnnnnnnnnnnnnnnnnnnnnnnnnnnnnnnnnnnnnnnnnnnnnnnnnnnnnnnnnnnnnnnnnnnnnnnnnnnnnnnnnnnnnnnnnnnnnnnnnnnnnnnnnnnnnnnnnnnnnnnnnnnnnnnnnnnnnnnnnnnnnnnnnnnnnnnnnnnnnnnnnnnnnnnnnnnnnnnnnnnnnnnnnnnnnnnnnnnnnnnnnnnnnnnnnnnnnnnnnnnnnnnnnnnnnnnnnnnnnnnnnnnnnnnnnnnnnnnnnnnnnnnnnnnnnnnnnnnnnnnnnnnnnnnnnnnnnnnnnnnnnnnnnnnnnnnnnnnnnnnnnnnnnnnnnnnnnnnnnnnnnnnnnnnnnnnnnnnnnnnnnnnnnnnnnnnnnnnnnnnnnnnnnnnnnnnnnnnnnnnnnnnnnnnnnnnnnnnnnnnnnnnnnnnnnnnnnnnnnnnnnnnnnnnnnnnnnnnnnnnnnnnnnnnnnnnnnnnnnnnnnnnnnnnnnnnnnnnnnnnnnnnnnnnnnnnnnnnnnnnnnnnnnnnnnnnnnnnnnnnnnnnnnnnnnnnnnnnnnnnnnnnnnnnnnnnnnnnnnnnnnnnnnnnnnnnnnnnnnnnnnnnnnnnnnnnnnnnnnnnnnnnnnnnnnnnnnnnnnnnnnnnnnnnnnnnnnnnnnnnnnnnnnnnnnnnnnnnnnnnnnnnnnnnnnnnnnnnnnnnnnnnnnnnnnnnnnnnnnnnnnnnnnnnnnnnnnnnnnnnnnnnnnnnnnnnnnnnnnnnnnnnnnnnnnnnnnnnnnnnnnnnnnnnnnnnnnnnnnnnnnnnnnnnnnnnnnnnnnnnnnnnnnnnnnnnnnnnnnnnnnnnnnnnnnnnnnnnnnnnnnnnnnnnnnnnnnnnnnnnnnnnnnnnnnnnnnnnnnnnnnnnnnnnnnnnnnnnnnnnnnnnnnnnnnnnnnnnnnnnnnnnnnnnnnnnnnnnnnnnnnnnnnnnnnnnnnnnnnnnnnnnnnnnnnnnnnnnnnnnnnnnnnnnnnnnnnnnnnnnnnnnnnnnnnnnnnnnnnnnnnnnnnnnnnnnnnnnnnnnnnnnnnnnnnnnnnnnnnnnnnnnnnnnnnnnnnnnnnnnnnnnnnnnnnnnnnnnnnnnnnnnnnnnnnnnnnnnnnnnnnnnnnnnnnnnnnnnnnnnnnnnnnnnnnnnnnnnnnnnnnnnnnnnnnnnnnnnnnnnnnnnnnnnnnnnnnnnnnnnnnnnnnnnnnnnnnnnnnnnnnnnnnnnnnnnnnnnnnnnnnnnnnnnnnnnnnnnnnnnnnnnnnnnnnnnnnnnnnnnnnnnnnnnnnnnnnnnnnnnnnnnnnnnnnnnnnnnnnnnnnnnnnnnnnnnnnnnnnnnnnnnnnnnnnnnnnnnnnnnnnnnnnnnnnnnnnnnnnnnnnnnnnnnnnnnnnnnnnnnnnnnnnnnnnnnnnnnnnnnnnnnnnnnnnnnnnnnnnnnnnnnnnnnnnnnnnnnnnnnnnnnnnnnnnnnnnnnnnnnnnnnnnnnnnnnnnnnnnnnnnnnnnnnnnnnnnnnnnnnnnnnnnnnnnnnnnnnnnnnnnnnnnnnnnnnnnnnnnnnnnnnnnnnnnnnnnnnnnnnnnnnnnnnnnnnnnnnnnnnnnnnnnnnnnnnnnnnnnnnnnnnnnnnnnnnnnnnnnnnnnnnnnnnnnnnnnnnnnnnnnnnnnnnnnnnnnnnnnnnnnnnnnnnnnnnnnnnnnnnnnnnnnnnnnnnnnnnnnnnnnnnnnnnnnnnnnnnnnnnnnnnnnnnnnnnnnnnnnnnnnnnnnnnnnnnnnnnnnnnnnnnnnnnnnnnnnnnnnnnnnnnnnnnnnnnnnnnnnnnnnnnnnnnnnnnnnnnnnnnnnnnnnnnnnnnnnnnnnnnnnnnnnnnnnnnnnnnnnnnnnnnnnnnnnnnnnnnnnnnnnnnnnnnnnnnnnnnnnnnnnnnnnnnnnnnnnnnnnnnnnnnnnnnnnnnnnnnnnnnnnnnnnnnnnnnnnnnnnnnnnnnnnnnnnnnnnnnnnnnnnnnnnnnnnnnnnnnnnnnnnnnnnnnnnnnnnnnnnnnnnnnnnnnnnnnnnnnnnnnnnnnnnnnnnnnnnnnnnnnnnnnnnnnnnnnnnnnnnnnnnnnnnnnnnnnnnnnnnnnnnnnnnnnnnnnnnnnnnnnnnnnnnnnnnnnnnnnnnnnnnnnnnnnnnnnnnnnnnnnnnnnnnnnnnnnnnnnnnnnnnnnnnnnnnnnnnnnnnnnnnnnnnnnnnnnnnnnnnnnnnnnnnnnnnnnnnnnnnnnnnnnnnnnnnnnnnnnnnnnnnnnnnnnnnnnnnnnnnnnnnnnnnnnnnnnnnnnnnnnnnnnnnnnnnnnnnnnnnnnnnnnnnnnnnnnnnnnnnnnnnnnnnnnnnnnnnnnnnnnnnnnnnnnnnnnnnnnnnnnnnnnnnnnnnnnnnnnnnnnnnnnnnnnnnnnnnnnnnnnnnnnnnnnnnnnnnnnnnnnnnnnnnnnnnnnnnnnnnnnnnnnnnnnnnnnnnnnnnnnnnnnnnnnnnnnnnnnnnnnnnnnnnnnnnnnnnnnnnnnnnnnnnnnnnnnnnnnnnnnnnnnnnnnnnnnnnnnnnnnnnnnnnnnnnnnnnnnnnnnnnnnnnnnnnnnnnnnnnnnnnnnnnnnnnnnnnnnnnnnnnnnnnnnnnnnnnnnnnnnnnnnnnnnnnnnnnnnnnnnnnnnnnnnnnnnnnnnnnnnnnnnnnnnnnnnnnnnnnnnnnnnnnnnnnnnnnnnnnnnnnnnnnnnnnnnnnnnnnnnnnnnnnnnnnnnnnnnnnnnnnnnnnnnnnnnnnnnnnnnnnnnnnnnnnnnnnnnnnnnnnnnnnnnnnnnnnnnnnnnnnnnnnnnnnnnnnnnnnnnnnnnnnnnnnnnnnnnnnnnnnnnnnnnnnnnnnnnnnnnnnnnnnnnnnnnnnnnnnnnnnnnnnnnnnnnnnnnnnnnnnnnnnnnnnnnnnnnnnnnnnnnnnnnnnnnnnnnnnnnnnnnnnnnnnnnnnnnnnnnnnnnnnnnnnnnnnnnnnnnnnnnnnnnnnnnnnnnnnnnnnnnnnnnnnnnnnnnnnnnnnnnnnnnnnnnnnnnnnnnnnnnnnnnnnnnnnnnnnnnnnnnnnnnnnnnnnnnnnnnnnnnnnnnnnnnnnnnnnnnnnnnnnnnnnnnnnnnnnnnnnnnnnnnnnnnnnnnnnnnnnnnnnnnnnnnnnnnnnnnnnnnnnnnnnnnnnnnnnnnnnnnnnnnnnnnnnnnnnnnnnnnnnnnnnnnnnnnnnnnnnnnnnnnnnnnnnnnnnnnnnnnnnnnnnnnnnnnnnnnnnnnnnnnnnnnnnnnnnnnnnnnnnnnnnnnnnnnnnnnnnnnnnnnnnnnnnnnnnnnnnnnnnnnnnnnnnnnnnnnnnnnnnnnnnnnnnnnnnnnnnnnnnnnnnnnnnnnnnnnnnnnnnnnnnnnnnnnnnnnnnnnnnnnnnnnnnnnnnnnnnnnnnnnnnnnnnnnnnnnnnnnnnnnnnnnnnnnnnnnnnnnnnnnnnnnnnnnnnnnnnnnnnnnnnnnnnnnnnnnnnnnnnnnnnnnnnnnnnnnnnnnnnnnnnnnnnnnnnnnnnnnnnnnnnnnnnnnnnnnnnnnnnnnnnnnnnnnnnnnnnnnnnnnnnnnnnnnnnnnnnnnnnnnnnnnnnnnnnnnnnnnnnnnnnnnnnnnnnnnnnnnnnnnnnnnnnnnnnnnnnnnnnnnnnnnnnnnnnnnnnnnnnnnnnnnnnnnnnnnnnnnnnnnnnnnnnnnnnnnnnnnnnnnnnnnnnnnnnnnnnnnnnnnnnnnnnnnnnnnnnnnnnnnnnnnnnnnnnnnnnnnnnnnnnnnnnnnnnnnnnnnnnnnnnnnnnnnnnnnnnnnnnnnnnnnnnnnnnnnnnnnnnnnnnnnnnnnnnnnnnnnnnnnnnnnnnnnnnnnnnnnnnnnnnnnnnnnnnnnnnnnnnnnnnnnnnnnnnnnnnnnnnnnnnnnnnnnnnnnnnnnnnnnnnnnnnnnnnnnnnnnnnnnnnnnnnnnnnnnnnnnnnnnnnnnnnnnnnnnnnnnnnnnnnnnnnnnnnnnnnnnnnnnnnnnnnnnnnnnnnnnnnnnnnnnnnnnnnnnnnnnnnnnnnnnnnnnnnnnnnnnnnnnnnnnnnnnnnnnnnnnnnnnnnnnnnnnnnnnnnnnnnnnnnnnnnnnnnnnnnnnnnnnnnnnnnnnnnnnnnnnnnnnnnnnnnnnnnnnnnnnnnnnnnnnnnnnnnnnnnnnnnnnnnnnnnnnnnnnnnnnnnnnnnnnnnnnnnnnnnnnnnnnnnnnnnnnnnnnnnnnnnnnnnnnnnnnnnnnnnnnnnnnnnnnnnnnnnnnnnnnnnnnnnnnnnnnnnnnnnnnnnnnnnnnnnnnnnnnnnnnnnnnnnnnnnnnnnnnnnnnnnnnnnnnnnnnnnnnnnnnnnnnnnnnnnnnnnnnnnnnnnnnnnnnnnnnnnnnnnnnnnnnnnnnnnnnnnnnnnnnnnnnnnnnnnnnnnnnnnnnnnnnnnnnnnnnnnnnnnnnnnnnnnnnnnnnnnnnnnnnnnnnnnnnnnnnnnnnnnnnnnnnnnnnnnnnnnnnnnnnnnnnnnnnnnnnnnnnnnnnnnnnnnnnnnnnnnnnnnnnnnnnnnnnnnnnnnnnnnnnnnnnnnnnnnnnnnnnnnnnnnnnnnnnnnnnnnnnnnnnnnnnnnnnnnnnnnnnnnnnnnnnnnnnnnnnnnnnnnnnnnnnnnnnnnnnnnnnnnnnnnnnnnnnnnnnnnnnnnnnnnnnnnnnnnnnnnnnnnnnnnnnnnnnnnnnnnnnnnnnnnnnnnnnnnnnnnnnnnnnnnnnnnnnnnnnnnnnnnnnnnnnnnnnnnnnnnnnnnnnnnnnnnnnnnnnnnnnnnnnnnnnnnnnnnnnnnnnnnnnnnnnnnnnnnnnnnnnnnnnnnnnnnnnnnnnnnnnnnnnnnnnnnnnnnnnnnnnnnnnnnnnnnnnnnnnnnnnnnnnnnnnnnnnnnnnnnnnnnnnnnnnnnnnnnnnnnnnnnnnnnnnnnnnnnnnnnnnnnnnnnnnnnnnnnnnnnnnnnnnnnnnnnnnnnnnnnnnnnnnnnnnnnnnnnnnnnnnnnnnnnnnnnnnnnnnnnnnnnnnnnnnnnnnnnnnnnnnnnnnnnnnnnnnnnnnnnnnnnnnnnnnnnnnnnnnnnnnnnnnnnnnnnnnnnnnnnnnnnnnnnnnnnnnnnnnnnnnnnnnnnnnnnnnnnnnnnnnnnnnnnnnnnnnnnnnnnnnnnnnnnnnnnnnnnnnnnnnnnnnnnnnnnnnnnnnnnnnnnnnnnnnnnnnnnnnnnnnnnnnnnnnnnnnnnnnnnnnnnnnnnnnnnnnnnnnnnnnnnnnnnnnnnnnnnnnnnnnnnnnnnnnnnnnnnnnnnnnnnnnnnnnnnnnnnnnnnnnnnnnnnnnnnnnnnnnnnnnnnnnnnnnnnnnnnnnnnnnnnnnnnnnnnnnnnnnnnnnnnnnnnnnnnnnnnnnnnnnnnnnnnnnnnnnnnnnnnnnnnnnnnnnnnnnnnnnnnnnnnnnnnnnnnnnnnnnnnnnnnnnnnnnnnnnnnnnnnnnnnnnnnnnnnnnnnnnnnnnnnnnnnnnnnnnnnnnnnnnnnnnnnnnnnnnnnnnnnnnnnnnnnnnnnnnnnnnnnnnnnnnnnnnnnnnnnnnnnnnnnnnnnnnnnnnnnnnnnnnnnnnnnnnnnnnnnnnnnnnnnnnnnnnnnnnnnnnnnnnnnnnnnnnnnnnnnnnnnnnnnnnnnnnnnnnnnnnnnnnnnnnnnnnnnnnnnnnnnnnnnnnnnnnnnnnnnnnnnnnnnnnnnnnnnnnnnnnnnnnnnnnnnnnnnnnnnnnnnnnnnnnnnnnnnnnnnnnnnnnnnnnnnnnnnnnnnnnnnnnnnnnnnnnnnnnnnnnnnnnnnnnnnnnnnnnnnnnnnnnnnnnnnnnnnnnnnnnnnnnnnnnnnnnnnnnnnnnnnnnnnnnnnnnnnnnnnnnnnnnnnnnnnnnnnnnnnnnnnnnnnnnnnnnnnnnnnnnnnnnnnnnnnnnnnnnnnnnnnnnnnnnnnnnnnnnnnnnnnnnnnnnnnnnnnnnnnnnnnnnnnnnnnnnnnnnnnnnnnnnnnnnnnnnnnnnnnnnnnnnnnnnnnnnnnnnnnnnnnnnnnnnnnnnnnnnnnnnnnnnnnnnnnnnnnnnnnnnnnnnnnnnnnnnnnnnnnnnnnnnnnnnnnnnnnnnnnnnnnnnnnnnnnnnnnnnnnnnnnnnnnnnnnnnnnnnnnnnnnnnnnnnnnnnnnnnnnnnnnnnnnnnnnnnnnnnnnnnnnnnnnnnnnnnnnnnnnnnnnnnnnnnnnnnnnnnnnnnnnnnnnnnnnnnnnnnnnnnnnnnnnnnnnnnnnnnnnnnnnnnnnnnnnnnnnnnnnnnnnnnnnnnnnnnnnnnnnnnnnnnnnnnnnnnnnnnnnnnnnnnnnnnnnnnnnnnnnnnnnnnnnnnnnnnnnnnnnnnnnnnnnnnnnnnnnnnnnnnnnnnnnnnnnnnnnnnnnnnnnnnnnnnnnnnnnnnnnnnnnnnnnnnnnnnnnnnnnnnnnnnnnnnnnnnnnnnnnnnnnnnnnnnnnnnnnnnnnnnnnnnnnnnnnnnnnnnnnnnnnnnnnnnnnnnnnnnnnnnnnnnnnnnnnnnnnnnnnnnnnnnnnnnnnnnnnnnnnnnnnnnnnnnnnnnnnnnnnnnnnnnnnnnnnnnnnnnnnnnnnnnnnnnnnnnnnnnnnnnnnnnnnnnnnnnnnnnnnnnnnnnnnnnnnnnnnnnnnnnnnnnnnnnnnnnnnnnnnnnnnnnnnnnnnnnnnnnnnnnnnnnnnnnnnnnnnnnnnnnnnnnnnnnnnnnnnnnnnnnnnnnnnnnnnnnnnnnnnnnnnnnnnnnnnnnnnnnnnnnnnnnnnnnnnnnnnnnnnnnnnnnnnnnnnnnnnnnnnnnnnnnnnnnnnnnnnnnnnnnnnnnnnnnnnnnnnnnnnnnnnnnnnnnnnnnnnnnnnnnnnnnnnnnnnnnnnnnnnnnnnnnnnnnnnnnnnnnnnnnnnnnnnnnnnnnnnnnnnnnnnnnnnnnnnnnnnnnnnnnnnnnnnnnnnnnnnnnnnnnnnnnnnnnnnnnnnnnnnnnnnnnnnnnnnnnnnnnnnnnnnnnnnnnnnnnnnnnnnnnnnnnnnnnnnnnnnnnnnnnnnnnnnnnnnnnnnnnnnnnnnnnnnnnnnnnnnnnnnnnnnnnnnnnnnnnnnnnnnnnnnnnnnnnnnnnnnnnnnnnnnnnnnnnnnnnnnnnnnnnnnnnnnnnnnnnnnnnnnnnnnnnnnnnnnnnnnnnnnnnnnnnnnnnnnnnnnnnnnnnnnnnnnnnnnnnnnnnnnnnnnnnnnnnnnnnnnnnnnnnnnnnnnnnnnnnnnnnnnnnnnnnnnnnnnnnnnnnnnnnnnnnnnnnnnnnnnnnnnnnnnnnnnnnnnnnnnnnnnnnnnnnnnnnnnnnnnnnnnnnnnnnnnnnnnnnnnnnnnnnnnnnnnnnnnnnnnnnnnnnnnnnnnnnnnnnnnnnnnnnnnnnnnnnnnnnnnnnnnnnnnnnnnnnnnnnnnnnnnnnnnnnnnnnnnnnnnnnnnnnnnnnnnnnnnnnnnnnnnnnnnnnnnnnnnnnnnnnnnnnnnnnnnnnnnnnnnnnnnnnnnnnnnnnnnnnnnnnnnnnnnnnnnnnnnnnnnnnnnnnnnnnnnnnnnnnnnnnnnnnnnnnnnnnnnnnnnnnnnnnnnnnnnnnnnnnnnnnnnnnnnnnnnnnnnnnnnnnnnnnnnnnnnnnnnnnnnnnnnnnnnnnnnnnnnnnnnnnnnnnnnnnnnnnnnnnnnnnnnnnnnnnnnnnnnnnnnnnnnnnnnnnnnnnnnnnnnnnnnnnnnnnnnnnnnnnnnnnnnnnnnnnnnnnnnnnnnnnnnnnnnnnnnnnnnnnnnnnnnnnnnnnnnnnnnnnnnnnnnnnnnnnnnnnnnnnnnnnnnnnnnnnnnnnnnnnnnnnnnnnnnnnnnnnnnnnnnnnnnnnnnnnnnnnnnnnnnnnnnnnnnnnnnnnnnnnnnnnnnnnnnnnnnnnnnnnnnnnnnnnnnnnnnnnnnnnnnnnnnnnnnnnnnnnnnnnnnnnnnnnnnnnnnnnnnnnnnnnnnnnnnnnnnnnnnnnnnnnnnnnnnnnnnnnnnnnnnnnnnnnnnnnnnnnnnnnnnnnnnnnnnnnnnnnnnnnnnnnnnnnnnnnnnnnnnnnnnnnnnnnnnnnnnnnnnnnnnnnnnnnnnnnnnnnnnnnnnnnnnnnnnnnnnnnnnnnnnnnnnnnnnnnnnnnnnnnnnnnnnnnnnnnnnnnnnnnnnnnnnnnnnnnnnnnnnnnnnnnnnnnnnnnnnnnnnnnnnnnnnnnnnnnnnnnnnnnnnnnnnnnnnnnnnnnnnnnnnnnnnnnnnnnnnnnnnnnnnnnnnnnnnnnnnnnnnnnnnnnnnnnnnnnnnnnnnnnnnnnnnnnnnnnnnnnnnnnnnnnnnnnnnnnnnnnnnnnnnnnnnnnnnnnnnnnnnnnnnnnnnnnnnnnnnnnnnnnnnnnnnnnnnnnnnnnnnnnnnnnnnnnnnnnnnnnnnnnnnnnnnnnnnnnnnnnnnnnnnnnnnnnnnnnnnnnnnnnnnnnnnnnnnnnnnnnnnnnnnnnnnnnnnnnnnnnnnnnnnnnnnnnnnnnnnnnnnnnnnnnnnnnnnnnnnnnnnnnnnnnnnnnnnnnnnnnnnnnnnnnnnnnnnnnnnnnnnnnnnnnnnnnnnnnnnnnnnnnnnnnnnnnnnnnnnnnnnnnnnnnnnnnnnnnnnnnnnnnnnnnnnnnnnnnnnnnnnnnnnnnnnnnnnnnnnnnnnnnnnnnnnnnnnnnnnnnnnnnnnnnnnnnnnnnnnnnnnnnnnnnnnnnnnnnnnnnnnnnnnnnnnnnnnnnnnnnnnnnnnnnnnnnnnnnnnnnnnnnnnnnnnnnnnnnnnnnnnnnnnnnnnnnnnnnnnnnnnnnnnnnnnnnnnnnnnnnnnnnnnnnnnnnnnnnnnnnnnnnnnnnnnnnnnnnnnnnnnnnnnnnnnnnnnnnnnnnnnnnnnnnnnnnnnnnnnnnnnnnnnnnnnnnnnnnnnnnnnnnnnnnnnnnnnnnnnnnnnnnnnnnnnnnnnnnnnnnnnnnnnnnnnnnnnnnnnnnnnnnnnnnnnnnnnnnnnnnnnnnnnnnnnnnnnnnnnnnnnnnnnnnnnnnnnnnnnnnnnnnnnnnnnnnnnnnnnnnnnnnnnnnnnnnnnnnnnnnnnnnnnnnnnnnnnnnnnnnnnnnnnnnnnnnnnnnnnnnnnnnnnnnnnnnnnnnnnnnnnnnnnnnnnnnnnnnnnnnnnnnnnnnnnnnnnnnnnnnnnnnnnnnnnnnnnnnnnnnnnnnnnnnnnnnnnnnnnnnnnnnnnnnnnnnnnnnnnnnnnnnnnnnnnnnnnnnnnnnnnnnnnnnnnnnnnnnnnnnnnnnnnnnnnnnnnnnnnnnnnnnnnnnnnnnnnnnnnnnnnnnnnnnnnnnnnnnnnnnnnnnnnnnnnnnnnnnnnnnnnnnnnnnnnnnnnnnnnnnnnnnnnnnnnnnnnnnnnnnnnnnnnnnnnnnnnnnnnnnnnnnnnnnnnnnnnnnnnnnnnnnnnnnnnnnnnnnnnnnnnnnnnnnnnnnnnnnnnnnnnnnnnnnnnnnnnnnnnnnnnnnnnnnnnnnnnnnnnnnnnnnnnnnnnnnnnnnnnnnnnnnnnnnnnnnnnnnnnnnnnnnnnnnnnnnnnnnnnnnnnnnnnnnnnnnnnnnnnnnnnnnnnnnnnnnnnnnnnnnnnnnnnnnnnnnnnnnnnnnnnnnnnnnnnnnnnnnnnnnnnnnnnnnnnnnnnnnnnnnnnnnnnnnnnnnnnnnnnnnnnnnnnnnnnnnnnnnnnnnnnnnnnnnnnnnnnnnnnnnnnnnnnnnnnnnnnnnnnnnnnnnnnnnnnnnnnnnnnnnnnnnnnnnnnnnnnnnnnnnnnnnnnnnnnnnnnnnnnnnnnnnnnnnnnnnnnnnnnnnnnnnnnnnnnnnnnnnnnnnnnnnnnnnnnnnnnnnnnnnnnnnnnnnnnnnnnnnnnnnnnnnnnnnnnnnnnnnnnnnnnnnnnnnnnnnnnnnnnnnnnnnnnnnnnnnnnnnnnnnnnnnnnnnnnnnnnnnnnnnnnnnnnnnnnnnnnnnnnnnnnnnnnnnnnnnnnnnnnnnnnnnnnnnnnnnnnnnnnnnnnnnnnnnnnnnnnnnnnnnnnnnnnnnnnnnnnnnnnnnnnnnnnnnnnnnnnnnnnnnnnnnnnnnnnnnnnnnnnnnnnnnnnnnnnnnnnnnnnnnnnnnnnnnnnnnnnnnnnnnnnnnnnnnnnnnnnnnnnnnnnnnnnnnnnnnnnnnnnnnnnnnnnnnnnnnnnnnnnnnnnnnnnnnnnnnnnnnnnnnnnnnnnnnnnnnnnnnnnnnnnnnnnnnnnnnnnnnnnnnnnnnnnnnnnnnnnnnnnnnnnnnnnnnnnnnnnnnnnnnnnnnnnnnnnnnnnnnnnnnnnnnnnnnnnnnnnnnnnnnnnnnnnnnnnnnnnnnnnnnnnnnnnnnnnnnnnnnnnnnnnnnnnnnnnnnnnnnnnnnnnnnnnnnnnnnnnnnnnnnnnnnnnnnnnnnnnnnnnnnnnnnnnnnnnnnnnnnnnnnnnnnnnnnnnnnnnnnnnnnnnnnnnnnnnnnnnnnnnnnnnnnnnnnnnnnnnnnnnnnnnnnnnnnnnnnnnnnnnnnnnnnnnnnnnnnnnnnnnnnnnnnnnnnnnnnnnnnnnnnnnnnnnnnnnnnnnnnnnnnnnnnnnnnnnnnnnnnnnnnnnnnnnnnnnnnnnnnnnnnnnnnnnnnnnnnnnnnnnnnnnnnnnnnnnnnnnnnnnnnnnnnnnnnnnnnnnnnnnnnnnnnnnnnnnnnnnnnnnnnnnnnnnnnnnnnnnnnnnnnnnnnnnnnnnnnnnnnnnnnnnnnnnnnnnnnnnnnnnnnnnnnnnnnnnnnnnnnnnnnnnnnnnnnnnnnnnnnnnnnnnnnnnnnnnnnnnnnnnnnnnnnnnnnnnnnnnnnnnnnnnnnnnnnnnnnnnnnnnnnnnnnnnnnnnnnnnnnnnnnnnnnnnnnnnnnnnnnnnnnnnnnnnnnnnnnnnnnnnnnnnnnnnnnnnnnnnnnnnnnnnnnnnnnnnnnnnnnnnnnnnnnnnnnnnnnnnnnnnnnnnnnnnnnnnnnnnnnnnnnnnnnnnnnnnnnnnnnnnnnnnnnnnnnnnnnnnnnnnnnnnnnnnnnnnnnnnnnnnnnnnnnnnnnnnnnnnnnnnnnnnnnnnnnnnnnnnnnnnnnnnnnnnnnnnnnnnnnnnnnnnnnnnnnnnnnnnnnnnnnnnnnnnnnnnnnnnnnnnnnnnnnnnnnnnnnnnnnnnnnnnnnnnnnnnnnnnnnnnnnnnnnnnnnnnnnnnnnnnnnnnnnnnnnnnnnnnnnnnnnnnnnnnnnnnnnnnnnnnnnnnnnnnnnnnnnnnnnnnnnnnnnnnnnnnnnnnnnnnnnnnnnnnnnnnnnnnnnnnnnnnnnnnnnnnnnnnnnnnnnnnnnnnnnnnnnnnnnnnnnnnnnnnnnnnnnnnnnnnnnnnnnnnnnnnnnnnnnnnnnnnnnnnnnnnnnnnnnnnnnnnnnnnnnnnnnnnnnnnnnnnnnnnnnnnnnnnnnnnnnnnnnnnnnnnnnnnnnnnnnnnnnnnnnnnnnnnnnnnnnnnnnnnnnnnnnnnnnnnnnnnnnnnnnnnnnnnnnnnnnnnnnnnnnnnnnnnnnnnnnnnnnnnnnnnnnnnnnnnnnnnnnnnnnnnnnnnnnnnnnnnnnnnnnnnnnnnnnnnnnnnnnnnnnnnnnnnnnnnnnnnnnnnnnnnnnnnnnnnnnnnnnnnnnnnnnnnnnnnnnnnnnnnnnnnnnnnnnnnnnnnnnnnnnnnnnnnnnnnnnnnnnnnnnnnnnnnnnnnnnnnnnnnnnnnnnnnnnnnnnnnnnnnnnnnnnnnnnnnnnnnnnnnnnnnnnnnnnnnnnnnnnnnnnnnnnnnnnnnnnnnnnnnnnnnnnnnnnnnnnnnnnnnnnnnnnnnnnnnnnnnnnnnnnnnnnnnnnnnnnnnnnnnnnnnnnnnnnnnnnnnnnnnnnnnnnnnnnnnnnnnnnnnnnnnnnnnnnnnnnnnnnnnnnnnnnnnnnnnnnnnnnnnnnnnnnnnnnnnnnnnnnnnnnnnnnnnnnnnnnnnnnnnnnnnnnnnnnnnnnnnnnnnnnnnnnnnnnnnnnnnnnnnnnnnnnnnnnnnnnnnnnnnnnnnnnnnnnnnnnnnnnnnnnnnnnnnnnnnnnnnnnnnnnnnnnnnnnnnnnnnnnnnnnnnnnnnnnnnnnnnnnnnnnnnnnnnnnnnnnnnnnnnnnnnnnnnnnnnnnnnnnnnnnnnnnnnnnnnnnnnnnnnnnnnnnnnnnnnnnnnnnnnnnnnnnnnnnnnnnnnnnnnnnnnnnnnnnnnnnnnnnnnnnnnnnnnnnnnnnnnnnnnnnnnnnnnnnnnnnnnnnnnnnnnnnnnnnnnnnnnnnnnnnnnnnnnnnnnnnnnnnnnnnnnnnnnnnnnnnnnnnnnnnnnnnnnnnnnnnnnnnnnnnnnnnnnnnnnnnnnnnnnnnnnnnnnnnnnnnnnnnnnnnnnnnnnnnnnnnnnnnnnnnnnnnnnnnnnnnnnnnnnnnnnnnnnnnnnnnnnnnnnnnnnnnnnnnnnnnnnnnnnnnnnnnnnnnnnnnnnnnnnnnnnnnnnnnnnnnnnnnnnnnnnnnnnnnnnnnnnnnnnnnnnnnnnnnnnnnnnnnnnnnnnnnnnnnnnnnnnnnnnnnnnnnnnnnnnnnnnnnnnnnnnnnnnnnnnnnnnnnnnnnnnnnnnnnnnnnnnnnnnnnnnnnnnnnnnnnnnnnnnnnnnnnnnnnnnnnnnnnnnnnnnnnnnnnnnnnnnnnnnnnnnnnnnnnnnnnnnnnnnnnnnnnnnnnnnnnnnnnnnnnnnnnnnnnnnnnnnnnnnnnnnnnnnnnnnnnnnnnnnnnnnnnnnnnnnnnnnnnnnnnnnnnnnnnnnnnnnnnnnnnnnnnnnnnnnnnnnnnnnnnnnnnnnnnnnnnnnnnnnnnnnnnnnnnnnnnnnnnnnnnnnnnnnnnnnnnnnnnnnnnnnnnnnnnnnnnnnnnnnnnnnnnnnnnnnnnnnnnnnnnnnnnnnnnnnnnnnnnnnnnnnnnnnnnnnnnnnnnnnnnnnnnnnnnnnnnnnnnnnnnnnnnnnnnnnnnnnnnnnnnnnnnnnnnnnnnnnnnnnnnnnnnnnnnnnnnnnnnnnnnnnnnnnnnnnnnnnnnnnnnnnnnnnnnnnnnnnnnnnnnnnnnnnnnnnnnnnnnnnnnnnnnnnnnnnnnnnnnnnnnnnnnnnnnnnnnnnnnnnnnnnnnnnnnnnnnnnnnnnnnnnnnnnnnnnnnnnnnnnnnnnnnnnnnnnnnnnnnnnnnnnnnnnnnnnnnnnnnnnnnnnnnnnnnnnnnnnnnnnnnnnnnnnnnnnnnnnnnnnnnnnnnnnnnnnnnnnnnnnnnnnnnnnnnnnnnnnnnnnnnnnnnnnnnnnnnnnnnnnnnnnnnnnnnnnnnnnnnnnnnnnnnnnnnnnnnnnnnnnnnnnnnnnnnnnnnnnnnnnnnnnnnnnnnnnnnnnnnnnnnnnnnnnnnnnnnnnnnnnnnnnnnnnnnnnnnnnnnnnnnnnnnnnnnnnnnnnnnnnnnnnnnnnnnnnnnnnnnnnnnnnnnnnnnnnnnnnnnnnnnnnnnnnnnnnnnnnnnnnnnnnnnnnnnnnnnnnnnnnnnnnnnnnnnnnnnnnnnnnnnnnnnnnnnnnnnnnnnnnnnnnnnnnnnnnnnnnnnnnnnnnnnnnnnnnnnnnnnnnnnnnnnnnnnnnnnnnnnnnnnnnnnnnnnnnnnnnnnnnnnnnnnnnnnnnnnnnnnnnnnnnnnnnnnnnnnnnnnnnnnnnnnnnnnnnnnnnnnnnnnnnnnnnnnnnnnnnnnnnnnnnnnnnnnnnnnnnnnnnnnnnnnnnnnnnnnnnnnnnnnnnnnnnnnnnnnnnnnnnnnnnnnnnnnnnnnnnnnnnnnnnnnnnnnnnnnnnnnnnnnnnnnnnnnnnnnnnnnnnnnnnnnnnnnnnnnnnnnnnnnnnnnnnnnnnnnnnnnnnnnnnnnnnnnnnnnnnnnnnnnnnnnnnnnnnnnnnnnnnnnnnnnnnnnnnnnnnnnnnnnnnnnnnnnnnnnnnnnnnnnnnnnnnnnnnnnnnnnnnnnnnnnnnnnnnnnnnnnnnnnnnnnnnnnnnnnnnnnnnnnnnnnnnnnnnnnnnnnnnnnnnnnnnnnnnnnnnnnnnnnnnnnnnnnnnnnnnnnnnnnnnnnnnnnnnnnnnnnnnnnnnnnnnnnnnnnnnnnnnnnnnnnnnnnnnnnnnnnnnnnnnnnnnnnnnnnnnnnnnnnnnnnnnnnnnnnnnnnnnnnnnnnnnnnnnnnnnnnnnnnnnnnnnnnnnnnnnnnnnnnnnnnnnnnnnnnnnnnnnnnnnnnnnnnnnnnnnnnnnnnnnnnnnnnnnnnnnnnnnnnnnnnnnnnnnnnnnnnnnnnnnnnnnnnnnnnnnnnnnnnnnnnnnnnnnnnnnnnnnnnnnnnnnnnnnnnnnnnnnnnnnnnnnnnnnnnnnnnnnnnnnnnnnnnnnnnnnnnnnnnnnnnnnnnnnnnnnnnnnnnnnnnnnnnnnnnnnnnnnnnnnnnnnnnnnnnnnnnnnnnnnnnnnnnnnnnnnnnnnnnnnnnnnnnnnnnnnnnnnnnnnnnnnnnnnnnnnnnnnnnnnnnnnnnnnnnnnnnnnnnnnnnnnnnnnnnnnnnnnnnnnnnnnnnnnnnnnnnnnnnnnnnnnnnnnnnnnnnnnnnnnnnnnnnnnnnnnnnnnnnnnnnnnnnnnnnnnnnnnnnnnnnnnnnnnnnnnnnnnnnnnnnnnnnnnnnnnnnnnnnnnnnnnnnnnnnnnnnnnnnnnnnnnnnnnnnnnnnnnnnnnnnnnnnnnnnnnnnnnnnnnnnnnnnnnnnnnnnnnnnnnnnnnnnnnnnnnnnnnnnnnnnnnnnnnnnnnnnnnnnnnnnnnnnnnnnnnnnnnnnnnnnnnnnnnnnnnnnnnnnnnnnnnnnnnnnnnnnnnnnnnnnnnnnnnnnnnnnnnnnnnnnnnnnnnnnnnnnnnnnnnnnnnnnnnnnnnnnnnnnnnnnnnnnnnnnnnnnnnnnnnnnnnnnnnnnnnnnnnnnnnnnnnnnnnnnnnnnnnnnnnnnnnnnnnnnnnnnnnnnnnnnnnnnnnnnnnnnnnnnnnnnnnnnnnnnnnnnnnnnnnnnnnnnnnnnnnnnnnnnnnnnnnnnnnnnnnnnnnnnnnnnnnnnnnnnnnnnnnnnnnnnnnnnnnnnnnnnnnnnnnnnnnnnnnnnnnnnnnnnnnnnnnnnnnnnnnnnnnnnnnnnnnnnnnnnnnnnnnnnnnnnnnnnnnnnnnnnnnnnnnnnnnnnnnnnnnnnnnnnnnnnnnnnnnnnnnnnnnnnnnnnnnnnnnnnnnnnnnnnnnnnnnnnnnnnnnnnnnnnnnnnnnnnnnnnnnnnnnnnnnnnnnnnnnnnnnnnnnnnnnnnnnnnnnnnnnnnnnnnnnnnnnnnnnnnnnnnnnnnnnnnnnnnnnnnnnnnnnnnnnnnnnnnnnnnnnnnnnnnnnnnnnnnnnnnnnnnnnnnnnnnnnnnnnnnnnnnnnnnnnnnnnnnnnnnnnnnnnnnnnnnnnnnnnnnnnnnnnnnnnnnnnnnnnnnnnnnnnnnnnnnnnnnnnnnnnnnnnnnnnnnnnnnnnnnnnnnnnnnnnnnnnnnnnnnnnnnnnnnnnnnnnnnnnnnnnnnnnnnnnnnnnnnnnnnnnnnnnnnnnnnnnnnnnnnnnnnnnnnnnnnnnnnnnnnnnnnnnnnnnnnnnnnnnnnnnnnnnnnnnnnnnnnnnnnnnnnnnnnnnnnnnnnnnnnnnnnnnnnnnnnnnnnnnnnnnnnnnnnnnnnnnnnnnnnnnnnnnnnnnnnnnnnnnnnnnnnnnnnnnnnnnnnnnnnnnnnnnnnnnnnnnnnnnnnnnnnnnnnnnnnnnnnnnnnnnnnnnnnnnnnnnnnnnnnnnnnnnnnnnnnnnnnnnnnnnnnnnnnnnnnnnnnnnnnnnnnnnnnnnnnnnnnnnnnnnnnnnnnnnnnnnnnnnnnnnnnnnnnnnnnnnnnnnnnnnnnnnnnnnnnnnnnnnnnnnnnnnnnnnnnnnnnnnnnnnnnnnnnnnnnnnnnnnnnnnnnnnnnnnnnnnnnnnnnnnnnnnnnnnnnnnnnnnnnnnnnnnnnnnnnnnnnnnnnnnnnnnnnnnnnnnnnnnnnnnnnnnnnnnnnnnnnnnnnnnnnnnnnnnnnnnnnnnnnnnnnnnnnnnnnnnnnnnnnnnnnnnnnnnnnnnnnnnnnnnnnnnnnnnnnnnnnnnnnnnnnnnnnnnnnnnnnnnnnnnnnnnnnnnnnnnnnnnnnnnnnnnnnnnnnnnnnnnnnnnnnnnnnnnnnnnnnnnnnnnnnnnnnnnnnnnnnnnnnnnnnnnnnnnnnnnnnnnnnnnnnnnnnnnnnnnnnnnnnnnnnnnnnnnnnnnnnnnnnnnnnnnnnnnnnnnnnnnnnnnnnnnnnnnnnnnnnnnnnnnnnnnnnnnnnnnnnnnnnnnnnnnnnnnnnnnnnnnnnnnnnnnnnnnnnnnnnnnnnnnnnnnnnnnnnnnnnnnnnnnnnnnnnnnnnnnnnnnnnnnnnnnnnnnnnnnnnnnnnnnnnnnnnnnnnnnnnnnnnnnnnnnnnnnnnnnnnnnnnnnnnnnnnnnnnnnnnnnnnnnnnnnnnnnnnnnnnnnnnnnnnnnnnnnnnnnnnnnnnnnnnnnnnnnnnnnnnnnnnnnnnnnnnnnnnnnnnnnnnnnnnnnnnnnnnnnnnnnnnnnnnnnnnnnnnnnnnnnnnnnnnnnnnnnnnnnnnnnnnnnnnnnnnnnnnnnnnnnnnnnnnnnnnnnnnnnnnnnnnnnnnnnnnnnnnnnnnnnnnnnnnnnnnnnnnnnnnnnnnnnnnnnnnnnnnnnnnnnnnnnnnnnnnnnnnnnnnnnnnnnnnnnnnnnnnnnnnnnnnnnnnnnnnnnnnnnnnnnnnnnnnnnnnnnnnnnnnnnnnnnnnnnnnnnnnnnnnnnnnnnnnnnnnnnnnnnnnnnnnnnnnnnnnnnnnnnnnnnnnnnnnnnnnnnnnnnnnnnnnnnnnnnnnnnnnnnnnnnnnnnnnnnnnnnnnnnnnnnnnnnnnnnnnnnnnnnnnnnnnnnnnnnnnnnnnnnnnnnnnnnnnnnnnnnnnnnnnnnnnnnnnnnnnnnnnnnnnnnnnnnnnnnnnnnnnnnnnnnnnnnnnnnnnnnnnnnnnnnnnnnnnnnnnnnnnnnnnnnnnnnnnnnnnnnnnnnnnnnnnnnnnnnnnnnnnnnnnnnnnnnnnnnnnnnnnnnnnnnnnnnnnnnnnnnnnnnnnnnnnnnnnnnnnnnnnnnnnnnnnnnnnnnnnnnnnnnnnnnnnnnnnnnnnnnnnnnnnnnnnnnnnnnnnnnnnnnnnnnnnnnnnnnnnnnnnnnnnnnnnnnnnnnnnnnnnnnnnnnnnnnnnnnnnnnnnnnnnnnnnnnnnnnnnnnnnnnnnnnnnnnnnnnnnnnnnnnnnnnnnnnnnnnnnnnnnnnnnnnnnnnnnnnnnnnnnnnnnnnnnnnnnnnnnnnnnnnnnnnnnnnnnnnnnnnnnnnnnnnnnnnnnnnnnnnnnnnnnnnnnnnnnnnnnnnnnnnnnnnnnnnnnnnnnnnnnnnnnnnnnnnnnnnnnnnnnnnnnnnnnnnnnnnnnnnnnnnnnnnnnnnnnnnnnnnnnnnnnnnnnnnnnnnnnnnnnnnnnnnnnnnnnnnnnnnnnnnnnnnnnnnnnnnnnnnnnnnnnnnnnnnnnnnnnnnnnnnnnnnnnnnnnnnnnnnnnnnnnnnnnnnnnnnnnnnnnnnnnnnnnnnnnnnnnnnnnnnnnnnnnnnnnnnnnnnnnnnnnnnnnnnnnnnnnnnnnnnnnnnnnnnnnnnnnnnnnnnnnnnnnnnnnnnnnnnnnnnnnnnnnnnnnnnnnnnnnnnnnnnnnnnnnnnnnnnnnnnnnnnnnnnnnnnnnnnnnnnnnnnnnnnnnnnnnnnnnnnnnnnnnnnnnnnnnnnnnnnnnnnnnnnnnnnnnnnnnnnnnnnnnnnnnnnnnnnnnnnnnnnnnnnnnnnnnnnnnnnnnnnnnnnnnnnnnnnnnnnnnnnnnnnnnnnnnnnnnnnnnnnnnnnnnnnnnnnnnnnnnnnnnnnnnnnnnnnnnnnnnnnnnnnnnnnnnnnnnnnnnnnnnnnnnnnnnnnnnnnnnnnnnnnnnnnnnnnnnnnnnnnnnnnnnnnnnnnnnnnnnnnnnnnnnnnnnnnnnnnnnnnnnnnnnnnnnnnnnnnnnnnnnnnnnnnnnnnnnnnnnnnnnnnnnnnnnnnnnnnnnnnnnnnnnnnnnnnnnnnnnnnnnnnnnnnnnnnnnnnnnnnnnnnnnnnnnnnnnnnnnnnnnnnnnnnnnnnnnnnnnnnnnnnnnnnnnnnnnnnnnnnnnnnnnnnnnnnnnnnnnnnnnnnnnnnnnnnnnnnnnnnnnnnnnnnnnnnnnnnnnnnnnnnnnnnnnnnnnnnnnnnnnnnnnnnnnnnnnnnnnnnnnnnnnnnnnnnnnnnnnnnnnnnnnnnnnnnnnnnnnnnnnnnnnnnnnnnnnnnnnnnnnnnnnnnnnnnnnnnnnnnnnnnnnnnnnnnnnnnnnnnnnnnnnnnnnnnnnnnnnnnnnnnnnnnnnnnnnnnnnnnnnnnnnnnnnnnnnnnnnnnnnnnnnnnnnnnnnnnnnnnnnnnnnnnnnnnnnnnnnnnnnnnnnnnnnnnnnnnnnnnnnnnnnnnnnnnnnnnnnnnnnnnnnnnnnnnnnnnnnnnnnnnnnnnnnnnnnnnnnnnnnnnnnnnnnnnnnnnnnnnnnnnnnnnnnnnnnnnnnnnnnnnnnnnnnnnnnnnnnnnnnnnnnnnnnnnnnnnnnnnnnnnnnnnnnnnnnnnnnnnnnnnnnnnnnnnnnnnnnnnnnnnnnnnnnnnnnnnnnnnnnnnnnnnnnnnnnnnnnnnnnnnnnnnnnnnnnnnnnnnnnnnnnnnnnnnnnnnnnnnnnnnnnnnnnnnnnnnnnnnnnnnnnnnnnnnnnnnnnnnnnnnnnnnnnnnnnnnnnnnnnnnnnnnnnnnnnnnnnnnnnnnnnnnnnnnnnnnnnnnnnnnnnnnnnnnnnnnnnnnnnnnnnnnnnnnnnnnnnnnnnnnnnnnnnnnnnnnnnnnnnnnnnnnnnnnnnnnnnnnnnnnnnnnnnnnnnnnnnnnnnnnnnnnnnnnnnnnnnnnnnnnnnnnnnnnnnnnnnnnnnnnnnnnnnnnnnnnnnnnnnnnnnnnnnnnnnnnnnnnnnnnnnnnnnnnnnnnnnnnnnnnnnnnnnnnnnnnnnnnnnnnnnnnnnnnnnnnnnnnnnnnnnnnnnnnnnnnnnnnnnnnnnnnnnnnnnnnnnnnnnnnnnnnnnnnnnnnnnnnnnnnnnnnnnnnnnnnnnnnnnnnnnnnnnnnnnnnnnnnnnnnnnnnnnnnnnnnnnnnnnnnnnnnnnnnnnnnnnnnnnnnnnnnnnnnnnnnnnnnnnnnnnnnnnnnnnnnnnnnnnnnnnnnnnnnnnnnnnnnnnnnnnnnnnnnnnnnnnnnnnnnnnnnnnnnnnnnnnnnnnnnnnnnnnnnnnnnnnnnnnnnnnnnnnnnnnnnnnnnnnnnnnnnnnnnnnnnnnnnnnnnnnnnnnnnnnnnnnnnnnnnnnnnnnnnnnnnnnnnnnnnnnnnnnnnnnnnnnnnnnnnnnnnnnnnnnnnnnnnnnnnnnnnnnnnnnnnnnnnnnnnnnnnnnnnnnnnnnnnnnnnnnnnnnnnnnnnnnnnnnnnnnnnnnnnnnnnnnnnnnnnnnnnnnnnnnnnnnnnnnnnnnnnnnnnnnnnnnnnnnnnnnnnnnnnnnnnnnnnnnnnnnnnnnnnnnnnnnnnnnnnnnnnnnnnnnnnnnnnnnnnnnnnnnnnnnnnnnnnnnnnnnnnnnnnnnnnnnnnnnnnnnnnnnnnnnnnnnnnnnnnnnnnnnnnnnnnnnnnnnnnnnnnnnnnnnnnnnnnnnnnnnnnnnnnnnnnnnnnnnnnnnnnnnnnnnnnnnnnnnnnnnnnnnnnnnnnnnnnnnnnnnnnnnnnnnnnnnnnnnnnnnnnnnnnnnnnnnnnnnnnnnnnnnnnnnnnnnnnnnnnnnnnnnnnnnnnnnnnnnnnnnnnnnnnnnnnnnnnnnnnnnnnnnnnnnnnnnnnnnnnnnnnnnnnnnnnnnnnnnnnnnnnnnnnnnnnnnnnnnnnnnnnnnnnnnnnnnnnnnnnnnnnnnnnnnnnnnnnnnnnnnnnnnnnnnnnnnnnnnnnnnnnnnnnnnnnnnnnnnnnnnnnnnnnnnnnnnnnnnnnnnnnnnnnnnnnnnnnnnnnnnnnnnnnnnnnnnnnnnnnnnnnnnnnnnnnnnnnnnnnnnnnnnnnnnnnnnnnnnnnnnnnnnnnnnnnnnnnnnnnnnnnnnnnnnnnnnnnnnnnnnnnnnnnnnnnnnnnnnnnnnnnnnnnnnnnnnnnnnnnnnnnnnnnnnnnnnnnnnnnnnnnnnnnnnnnnnnnnnnnnnnnnnnnnnnnnnnnnnnnnnnnnnnnnnnnnnnnnnnnnnnnnnnnnnnnnnnnnnnnnnnnnnnnnnnnnnnnnnnnnnnnnnnnnnnnnnnnnnnnnnnnnnnnnnnnnnnnnnnnnnnnnnnnnnnnnnnnnnnnnnnnnnnnnnnnnnnnnnnnnnnnnnnnnnnnnnnnnnnnnnnnnnnnnnnnnnnnnnnnnnnnnnnnnnnnnnnnnnnnnnnnnnnnnnnnnnnnnnnnnnnnnnnnnnnnnnnnnnnnnnnnnnnnnnnnnnnnnnnnnnnnnnnnnnnnnnnnnnnnnnnnnnnnnnnnnnnnnnnnnnnnnnnnnnnnnnnnnnnnnnnnnnnnnnnnnnnnnnnnnnnnnnnnnnnnnnnnnnnnnnnnnnnnnnnnnnnnnnnnnnnnnnnnnnnnnnnnnnnnnnnnnnnnnnnnnnnnnnnnnnnnnnnnnnnnnnnnnnnnnnnnnnnnnnnnnnnnnnnnnnnnnnnnnnnnnnnnnnnnnnnnnnnnnnnnnnnnnnnnnnnnnnnnnnnnnnnnnnnnnnnnnnnnnnnnnnnnnnnnnnnnnnnnnnnnnnnnnnnnnnnnnnnnnnnnnnnnnnnnnnnnnnnnnnnnnnnnnnnnnnnnnnnnnnnnnnnnnnnnnnnnnnnnnnnnnnnnnnnnnnnnnnnnnnnnnnnnnnnnnnnnnnnnnnnnnnnnnnnnnnnnnnnnnnnnnnnnnnnnnnnnnnnnnnnnnnnnnnnnnnnnnnnnnnnnnnnnnnnnnnnnnnnnnnnnnnnnnnnnnnnnnnnnnnnnnnnnnnnnnnnnnnnnnnnnnnnnnnnnnnnnnnnnnnnnnnnnnnnnnnnnnnnnnnnnnnnnnnnnnnnnnnnnnnnnnnnnnnnnnnnnnnnnnnnnnnnnnnnnnnnnnnnnnnnnnnnnnnnnnnnnnnnnnnnnnnnnnnnnnnnnnnnnnnnnnnnnnnnnnnnnnnnnnnnnnnnnnnnnnnnnnnnnnnnnnnnnnnnnnnnnnnnnnnnnnnnnnnnnnnnnnnnnnnnnnnnnnnnnnnnnnnnnnnnnnnnnnnnnnnnnnnnnnnnnnnnnnnnnnnnnnnnnnnnnnnnnnnnnnnnnnnnnnnnnnnnnnnnnnnnnnnnnnnnnnnnnnnnnnnnnnnnnnnnnnnnnnnnnnnnnnnnnnnnnnnnnnnnnnnnnnnnnnnnnnnnnnnnnnnnnnnnnnnnnnnnnnnnnnnnnnnnnnnnnnnnnnnnnnnnnnnnnnnnnnnnnnnnnnnnnnnnnnnnnnnnnnnnnnnnnnnnnnnnnnnnnnnnnnnnnnnnnnnnnnnnnnnnnnnnnnnnnnnnnnnnnnnnnnnnnnnnnnnnnnnnnnnnnnnnnnnnnnnnnnnnnnnnnnnnnnnnnnnnnnnnnnnnnnnnnnnnnnnnnnnnnnnnnnnnnnnnnnnnnnnnnnnnnnnnnnnnnnnnnnnnnnnnnnnnnnnnnnnnnnnnnnnnnnnnnnnnnnnnnnnnnnnnnnnnnnnnnnnnnnnnnnnnnnnnnnnnnnnnnnnnnnnnnnnnnnnnnnnnnnnnnnnnnnnnnnnnnnnnnnnnnnnnnnnnnnnnnnnnnnnnnnnnnnnnnnnnnnnnnnnnnnnnnnnnnnnnnnnnnnnnnnnnnnnnnnnnnnnnnnnnnnnnnnnnnnnnnnnnnnnnnnnnnnnnnnnnnnnnnnnnnnnnnnnnnnnnnnnnnnnnnnnnnnnnnnnnnnnnnnnnnnnnnnnnnnnnnnnnnnnnnnnnnnnnnnnnnnnnnnnnnnnnnnnnnnnnnnnnnnnnnnnnnnnnnnnnnnnnnnnnnnnnnnnnnnnnnnnnnnnnnnnnnnnnnnnnnnnnnnnnnnnnnnnnnnnnnnnnnnnnnnnnnnnnnnnnnnnnnnnnnnnnnnnnnnnnnnnnnnnnnnnnnnnnnnnnnnnnnnnnnnnnnnnnnnnnnnnnnnnnnnnnnnnnnnnnnnnnnnnnnnnnnnnnnnnnnnnnnnnnnnnnnnnnnnnnnnnnnnnnnnnnnnnnnnnnnnnnnnnnnnnnnnnnnnnnnnnnnnnnnnnnnnnnnnnnnnnnnnnnnnnnnnnnnnnnnnnnnnnnnnnnnnnnnnnnnnnnnnnnnnnnnnnnnnnnnnnnnnnnnnnnnnnnnnnnnnnnnnnnnnnnnnnnnnnnnnnnnnnnnnnnnnnnnnnnnnnnnnnnnnnnnnnnnnnnnnnnnnnnnnnnnnnnnnnnnnnnnnnnnnnnnnnnnnnnnnnnnnnnnnnnnnnnnnnnnnnnnnnnnnnnnnnnnnnnnnnnnnnnnnnnnnnnnnnnnnnnnnnnnnnnnnnnnnnnnnnnnnnnnnnnnnnnnnnnnnnnnnnnnnnnnnnnnnnnnnnnnnnnnnnnnnnnnnnnnnnnnnnnnnnnnnnnnnnnnnnnnnnnnnnnnnnnnnnnnnnnnnnnnnnnnnnnnnnnnnnnnnnnnnnnnnnnnnnnnnnnnnnnnnnnnnnnnnnnnnnnnnnnnnnnnnnnnnnnnnnnnnnnnnnnnnnnnnnnnnnnnnnnnnnnnnnnnnnnnnnnnnnnnnnnnnnnnnnnnnnnnnnnnnnnnnnnnnnnnnnnnnnnnnnnnnnnnnnnnnnnnnnnnnnnnnnnnnnnnnnnnnnnnnnnnnnnnnnnnnnnnnnnnnnnnnnnnnnnnnnnnnnnnnnnnnnnnnnnnnnnnnnnnnnnnnnnnnnnnnnnnnnnnnnnnnnnnnnnnnnnnnnnnnnnnnnnnnnnnnnnnnnnnnnnnnnnnnnnnnnnnnnnnnnnnnnnnnnnnnnnnnnnnnnnnnnnnnnnnnnnnnnnnnnnnnnnnnnnnnnnnnnnnnnnnnnnnnnnnnnnnnnnnnnnnnnnnnnnnnnnnnnnnnnnnnnnnnnnnnnnnnnnnnnnnnnnnnnnnnnnnnnnnnnnnnnnnnnnnnnnnnnnnnnnnnnnnnnnnnnnnnnnnnnnnnnnnnnnnnnnnnnnnnnnnnnnnnnnnnnnnnnnnnnnnnnnnnnnnnnnnnnnnnnnnnnnnnnnnnnnnnnnnnnnnnnnnnnnnnnnnnnnnnnnnnnnnnnnnnnnnnnnnnnnnnnnnnnnnnnnnnnnnnnnnnnnnnnnnnnnnnnnnnnnnnnnnnnnnnnnnnnnnnnnnnnnnnnnnnnnnnnnnnnnnnnnnnnnnnnnnnnnnnnnnnnnnnnnnnnnnnnnnnnnnnnnnnnnnnnnnnnnnnnnnnnnnnnnnnnnnnnnnnnnnnnnnnnnnnnnnnnnnnnnnnnnnnnnnnnnnnnnnnnnnnnnnnnnnnnnnnnnnnnnnnnnnnnnnnnnnnnnnnnnnnnnnnnnnnnnnnnnnnnnnnnnnnnnnnnnnnnnnnnnnnnnnnnnnnnnnnnnnnnnnnnnnnnnnnnnnnnnnnnnnnnnnnnnnnnnnnnnnnnnnnnnnnnnnnnnnnnnnnnnnnnnnnnnnnnnnnnnnnnnnnnnnnnnnnnnnnnnnnnnnnnnnnnnnnnnnnnnnnnnnnnnnnnnnnnnnnnnnnnnnnnnnnnnnnnnnnnnnnnnnnnnnnnnnnnnnnnnnnnnnnnnnnnnnnnnnnnnnnnnnnnnnnnnnnnnnnnnnnnnnnnnnnnnnnnnnnnnnnnnnnnnnnnnnnnnnnnnnnnnnnnnnnnnnnnnnnnnnnnnnnnnnnnnnnnnnnnnnnnnnnnnnnnnnnnnnnnnnnnnnnnnnnnnnnnnnnnnnnnnnnnnnnnnnnnnnnnnnnnnnnnnnnnnnnnnnnnnnnnnnnnnnnnnnnnnnnnnnnnnnnnnnnnnnnnnnnnnnnnnnnnnnnnnnnnnnnnnnnnnnnnnnnnnnnnnnnnnnnnnnnnnnnnnnnnnnnnnnnnnnnnnnnnnnnnnnnnnnnnnnnnnnnnnnnnnnnnnnnnnnnnnnnnnnnnnnnnnnnnnnnnnnnnnnnnnnnnnnnnnnnnnnnnnnnnnnnnnnnnnnnnnnnnnnnnnnnnnnnnnnnnnnnnnnnnnnnnnnnnnnnnnnnnnnnnnnnnnnnnnnnnnnnnnnnnnnnnnnnnnnnnnnnnnnnnnnnnnnnnnnnnnnnnnnnnnnnnnnnnnnnnnnnnnnnnnnnnnnnnnnnnnnnnnnnnnnnnnnnnnnnnnnnnnnnnnnnnnnnnnnnnnnnnnnnnnnnnnnnnnnnnnnnnnnnnnnnnnnnnnnnnnnnnnnnnnnnnnnnnnnnnnnnnnnnnnnnnnnnnnnnnnnnnnnnnnnnnnnnnnnnnnnnnnnnnnnnnnnnnnnnnnnnnnnnnnnnnnnnnnnnnnnnnnnnnnnnnnnnnnnnnnnnnnnnnnnnnnnnnnnnnnnnnnnnnnnnnnnnnnnnnnnnnnnnnnnnnnnnnnnnnnnnnnnnnnnnnnnnnnnnnnnnnnnnnnnnnnnnnnnnnnnnnnnnnnnnnnnnnnnnnnnnnnnnnnnnnnnnnnnnnnnnnnnnnnnnnnnnnnnnnnnnnnnnnnnnnnnnnnnnnnnnnnnnnnnnnnnnnnnnnnnnnnnnnnnnnnnnnnnnnnnnnnnnnnnnnnnnnnnnnnnnnnnnnnnnnnnnnnnnnnnnnnnnnnnnnnnnnnnnnnnnnnnnnnnnnnnnnnnnnnnnnnnnnnnnnnnnnnnnnnnnnnnnnnnnnnnnnnnnnnnnnnnnnnnnnnnnnnnnnnnnnnnnnnnnnnnnnnnnnnnnnnnnnnnnnnnnnnnnnnnnnnnnnnnnnnnnnnnnnnnnnnnnnnnnnnnnnnnnnnnnnnnnnnnnnnnnnnnnnnnnnnnnnnnnnnnnnnnnnnnnnnnnnnnnnnnnnnnnnnnnnnnnnnnnnnnnnnnnnnnnnnnnnnnnnnnnnnnnnnnnnnnnnnnnnnnnnnnnnnnnnnnnnnnnnnnnnnnnnnnnnnnnnnnnnnnnnnnnnnnnnnnnnnnnnnnnnnnnnnnnnnnnnnnnnnnnnnnnnnnnnnnnnnnnnnnnnnnnnnnnnnnnnnnnnnnnnnnnnnnnnnnnnnnnnnnnnnnnnnnnnnnnnnnnnnnnnnnnnnnnnnnnnnnnnnnnnnnnnnnnnnnnnnnnnnnnnnnnnnnnnnnnnnnnnnnnnnnnnnnnnnnnnnnnnnnnnnnnnnnnnnnnnnnnnnnnnnnnnnnnnnnnnnnnnnnnnnnnnnnnnnnnnnnnnnnnnnnnnnnnnnnnnnnnnnnnnnnnnnnnnnnnnnnnnnnnnnnnnnnnnnnnnnnnnnnnnnnnnnnnnnnnnnnnnnnnnnnnnnnnnnnnnnnnnnnnnnnnnnnnnnnnnnnnnnnnnnnnnnnnnnnnnnnnnnnnnnnnnnnnnnnnnnnnnnnnnnnnnnnnnnnnnnnnnnnnnnnnnnnnnnnnnnnnnnnnnnnnnnnnnnnnnnnnnnnnnnnnnnnnnnnnnnnnnnnnnnnnnnnnnnnnnnnnnnnnnnnnnnnnnnnnnnnnnnnnnnnnnnnnnnnnnnnnnnnnnnnnnnnnnnnnnnnnnnnnnnnnnnnnnnnnnnnnnnnnnnnnnnnnnnnnnnnnnnnnnnnnnnnnnnnnnnnnnnnnnnnnnnnnnnnnnnnnnnnnnnnnnnnnnnnnnnnnnnnnnnnnnnnnnnnnnnnnnnnnnnnnnnnnnnnnnnnnnnnnnnnnnnnnnnnnnnnnnnnnnnnnnnnnnnnnnnnnnnnnnnnnnnnnnnnnnnnnnnnnnnnnnnnnnnnnnnnnnnnnnnnnnnnnnnnnnnnnnnnnnnnnnnnnnnnnnnnnnnnnnnnnnnnnnnnnnnnnnnnnnnnnnnnnnnnnnnnnnnnnnnnnnnnnnnnnnnnnnnnnnnnnnnnnnnnnnnnnnnnnnnnnnnnnnnnnnnnnnnnnnnnnnnnnnnnnnnnnnnnnnnnnnnnnnnnnnnnnnnnnnnnnnnnnnnnnnnnnnnnnnnnnnnnnnnnnnnnnnnnnnnnnnnnnnnnnnnnnnnnnnnnnnnnnnnnnnnnnnnnnnnnnnnnnnnnnnnnnnnnnnnnnnnnnnnnnnnnnnnnnnnnnnnnnnnnnnnnnnnnnnnnnnnnnnnnnnnnnnnnnnnnnnnnnnnnnnnnnnnnnnnnnnnnnnnnnnnnnnnnnnnnnnnnnnnnnnnnnnnnnnnnnnnnnnnnnnnnnnnnnnnnnnnnnnnnnnnnnnnnnnnnnnnnnnnnnnnnnnnnnnnnnnnnnnnnnnnnnnnnnnnnnnnnnnnnnnnnnnnnnnnnnnnnnnnnnnnnnnnnnnnnnnnnnnnnnnnnnnnnnnnnnnnnnnnnnnnnnnnnnnnnnnnnnnnnnnnnnnnnnnnnnnnnnnnnnnnnnnnnnnnnnnnnnnnnnnnnnnnnnnnnnnnnnnnnnnnnnnnnnnnnnnnnnnnnnnnnnnnnnnnnnnnnnnnnnnnnnnnnnnnnnnnnnnnnnnnnnnnnnnnnnnnnnnnnnnnnnnnnnnnnnnnnnnnnnnnnnnnnnnnnnnnnnnnnnnnnnnnnnnnnnnnnnnnnnnnnnnnnnnnnnnnnnnnnnnnnnnnnnnnnnnnnnnnnnnnnnnnnnnnnnnnnnnnnnnnnnnnnnnnnnnnnnnnnnnnnnnnnnnnnnnnnnnnnnnnnnnnnnnnnnnnnnnnnnnnnnnnnnnnnnnnnnnnnnnnnnnnnnnnnnnnnnnnnnnnnnnnnnnnnnnnnnnnnnnnnnnnnnnnnnnnnnnnnnnnnnnnnnnnnnnnnnnnnnnnnnnnnnnnnnnnnnnnnnnnnnnnnnnnnnnnnnnnnnnnnnnnnnnnnnnnnnnnnnnnnnnnnnnnnnnnnnnnnnnnnnnnnnnnnnnnnnnnnnnnnnnnnnnnnnnnnnnnnnnnnnnnnnnnnnnnnnnnnnnnnnnnnnnnnnnnnnnnnnnnnnnnnnnnnnnnnnnnnnnnnnnnnnnnnnnnnnnnnnnnnnnnnnnnnnnnnnnnnnnnnnnnnnnnnnnnnnnnnnnnnnnnnnnnnnnnnnnnnnnnnnnnnnnnnnnnnnnnnnnnnnnnnnnnnnnnnnnnnnnnnnnnnnnnnnnnnnnnnnnnnnnnnnnnnnnnnnnnnnnnnnnnnnnnnnnnnnnnnnnnnnnnnnnnnnnnnnnnnnnnnnnnnnnnnnnnnnnnnnnnnnnnnnnnnnnnnnnnnnnnnnnnnnnnnnnnnnnnnnnnnnnnnnnnnnnnnnnnnnnnnnnnnnnnnnnnnnnnnnnnnnnnnnnnnnnnnnnnnnnnnnnnnnnnnnnnnnnnnnnnnnnnnnnnnnnnnnnnnnnnnnnnnnnnnnnnnnnnnnnnnnnnnnnnnnnnnnnnnnnnnnnnnnnnnnnnnnnnnnnnnnnnnnnnnnnnnnnnnnnnnnnnnnnnnnnnnnnnnnnnnnnnnnnnnnnnnnnnnnnnnnnnnnnnnnnnnnnnnnnnnnnnnnnnnnnnnnnnnnnnnnnnnnnnnnnnnnnnnnnnnnnnnnnnnnnnnnnnnnnnnnnnnnnnnnnnnnnnnnnnnnnnnnnnnnnnnnnnnnnnnnnnnnnnnnnnnnnnnnnnnnnnnnnnnnnnnnnnnnnnnnnnnnnnnnnnnnnnnnnnnnnnnnnnnnnnnnnnnnnnnnnnnnnnnnnnnnnnnnnnnnnnnnnnnnnnnnnnnnnnnnnnnnnnnnnnnnnnnnnnnnnnnnnnnnnnnnnnnnnnnnnnnnnnnnnnnnnnnnnnnnnnnnnnnnnnnnnnnnnnnnnnnnnnnnnnnnnnnnnnnnnnnnnnnnnnnnnnnnnnnnnnnnnnnnnnnnnnnnnnnnnnnnnnnnnnnnnnnnnnnnnnnnnnnnnnnnnnnnnnnnnnnnnnnnnnnnnnnnnnnnnnnnnnnnnnnnnnnnnnnnnnnnnnnnnnnnnnnnnnnnnnnnnnnnnnnnnnnnnnnnnnnnnnnnnnnnnnnnnnnnnnnnnnnnnnnnnnnnnnnnnnnnnnnnnnnnnnnnnnnnnnnnnnnnnnnnnnnnnnnnnnnnnnnnnnnnnnnnnnnnnnnnnnnnnnnnnnnnnnnnnnnnnnnnnnnnnnnnnnnnnnnnnnnnnnnnnnnnnnnnnnnnnnnnnnnnnnnnnnnnnnnnnnnnnnnnnnnnnnnnnnnnnnnnnnnnnnnnnnnnnnnnnnnnnnnnnnnnnnnnnnnnnnnnnnnnnnnnnnnnnnnnnnnnnnnnnnnnnnnnnnnnnnnnnnnnnnnnnnnnnnnnnnnnnnnnnnnnnnnnnnnnnnnnnnnnnnnnnnnnnnnnnnnnnnnnnnnnnnnnnnnnnnnnnnnnnnnnnnnnnnnnnnnnnnnnnnnnnnnnnnnnnnnnnnnnnnnnnnnnnnnnnnnnnnnnnnnnnnnnnnnnnnnnnnnnnnnnnnnnnnnnnnnnnnnnnnnnnnnnnnnnnnnnnnnnnnnnnnnnnnnnnnnnnnnnnnnnnnnnnnnnnnnnnnnnnnnnnnnnnnnnnnnnnnnnnnnnnnnnnnnnnnnnnnnnnnnnnnnnnnnnnnnnnnnnnnnnnnnnnnnnnnnnnnnnnnnnnnnnnnnnnnnnnnnnnnnnnnnnnnnnnnnnnnnnnnnnnnnnnnnnnnnnnnnnnnnnnnnnnnnnnnnnnnnnnnnnnnnnnnnnnnnnnnnnnnnnnnnnnnnnnnnnnnnnnnnnnnnnnnnnnnnnnnnnnnnnnnnnnnnnnnnnnnnnnnnnnnnnnnnnnnnnnnnnnnnnnnnnnnnnnnnnnnnnnnnnnnnnnnnnnnnnnnnnnnnnnnnnnnnnnnnnnnnnnnnnnnnnnnnnnnnnnnnnnnnnnnnnnnnnnnnnnnnnnnnnnnnnnnnnnnnnnnnnnnnnnnnnnnnnnnnnnnnnnnnnnnnnnnnnnnnnnnnnnnnnnnnnnnnnnnnnnnnnnnnnnnnnnnnnnnnnnnnnnnnnnnnnnnnnnnnnnnnnnnnnnnnnnnnnnnnnnnnnnnnnnnnnnnnnnnnnnnnnnnnnnnnnnnnnnnnnnnnnnnnnnnnnnnnnnnnnnnnnnnnnnnnnnnnnnnnnnnnnnnnnnnnnnnnnnnnnnnnnnnnnnnnnnnnnnnnnnnnnnnnnnnnnnnnnnnnnnnnnnnnnnnnnnnnnnnnnnnnnnnnnnnnnnnnnnnnnnnnnnnnnnnnnnnnnnnnnnnnnnnnnnnnnnnnnnnnnnnnnnnnnnnnnnnnnnnnnnnnnnnnnnnnnnnnnnnnnnnnnnnnnnnnnnnnnnnnnnnnnnnnnnnnnnnnnnnnnnnnnnnnnnnnnnnnnnnnnnnnnnnnnnnnnnnnnnnnnnnnnnnnnnnnnnnnnnnnnnnnnnnnnnnnnnnnnnnnnnnnnnnnnnnnnnnnnnnnnnnnnnnnnnnnnnnnnnnnnnnnnnnnnnnnnnnnnnnnnnnnnnnnnnnnnnnnnnnnnnnnnnnnnnnnnnnnnnnnnnnnnnnnnnnnnnnnnnnnnnnnnnnnnnnnnnnnnnnnnnnnnnnnnnnnnnnnnnnnnnnnnnnnnnnnnnnnnnnnnnnnnnnnnnnnnnnnnnnnnnnnnnnnnnnnnnnnnnnnnnnnnnnnnnnnnnnnnnnnnnnnnnnnnnnnnnnnnnnnnnnnnnnnnnnnnnnnnnnnnnnnnnnnnnnnnnnnnnnnnnnnnnnnnnnnnnnnnnnnnnnnnnnnnnnnnnnnnnnnnnnnnnnnnnnnnnnnnnnnnnnnnnnnnnnnnnnnnnnnnnnnnnnnnnnnnnnnnnnnnnnnnnnnnnnnnnnnnnnnnnnnnnnnnnnnnnnnnnnnnnnnnnnnnnnnnnnnnnnnnnnnnnnnnnnnnnnnnnnnnnnnnnnnnnnnnnnnnnnnnnnnnnnnnnnnnnnnnnnnnnnnnnnnnnnnnnnnnnnnnnnnnnnnnnnnnnnnnnnnnnnnnnnnnnnnnnnnnnnnnnnnnnnnnnnnnnnnnnnnnnnnnnnnnnnnnnnnnnnnnnnnnnnnnnnnnnnnnnnnnnnnnnnnnnnnnnnnnnnnnnnnnnnnnnnnnnnnnnnnnnnnnnnnnnnnnnnnnnnnnnnnnnnnnnnnnnnnnnnnnnnnnnnnnnnnnnnnnnnnnnnnnnnnnnnnnnnnnnnnnnnnnnnnnnnnnnnnnnnnnnnnnnnnnnnnnnnnnnnnnnnnnnnnnnnnnnnnnnnnnnnnnnnnnnnnnnnnnnnnnnnnnnnnnnnnnnnnnnnnnnnnnnnnnnnnnnnnnnnnnnnnnnnnnnnnnnnnnnnnnnnnnnnnnnnnnnnnnnnnnnnnnnnnnnnnnnnnnnnnnnnnnnnnnnnnnnnnnnnnnnnnnnnnnnnnnnnnnnnnnnnnnnnnnnnnnnnnnnnnnnnnnnnnnnnnnnnnnnnnnnnnnnnnnnnnnnnnnnnnnnnnnnnnnnnnnnnnnnnnnnnnnnnnnnnnnnnnnnnnnnnnnnnnnnnnnnnnnnnnnnnnnnnnnnnnnnnnnnnnnnnnnnnnnnnnnnnnnnnnnnnnnnnnnnnnnnnnnnnnnnnnnnnnnnnnnnnnnnnnnnnnnnnnnnnnnnnnnnnnnnnnnnnnnnnnnnnnnnnnnnnnnnnnnnnnnnnnnnnnnnnnnnnnnnnnnnnnnnnnnnnnnnnnnnnnnnnnnnnnnnnnnnnnnnnnnnnnnnnnnnnnnnnnnnnnnnnnnnnnnnnnnnnnnnnnnnnnnnnnnnnnnnnnnnnnnnnnnnnnnnnnnnnnnnnnnnnnnnnnnnnnnnnnnnnnnnnnnnnnnnnnnnnnnnnnnnnnnnnnnnnnnnnnnnnnnnnnnnnnnnnnnnnnnnnnnnnnnnnnnnnnnnnnnnnnnnnnnnnnnnnnnnnnnnnnnnnnnnnnnnnnnnnnnnnnnnnnnnnnnnnnnnnnnnnnnnnnnnnnnnnnnnnnnnnnnnnnnnnnnnnnnnnnnnnnnnnnnnnnnnnnnnnnnnnnnnnnnnnnnnnnnnnnnnnnnnnnnnnnnnnnnnnnnnnnnnnnnnnnnnnnnnnnnnnnnnnnnnnnnnnnnnnnnnnnnnnnnnnnnnnnnnnnnnnnnnnnnnnnnnnnnnnnnnnnnnnnnnnnnnnnnnnnnnnnnnnnnnnnnnnnnnnnnnnnnnnnnnnnnnnnnnnnnnnnnnnnnnnnnnnnnnnnnnnnnnnnnnnnnnnnnnnnnnnnnnnnnnnnnnnnnnnnnnnnnnnnnnnnnnnnnnnnnnnnnnnnnnnnnnnnnnnnnnnnnnnnnnnnnnnnnnnnnnnnnnnnnnnnnnnnnnnnnnnnnnnnnnnnnnnnnnnnnnnnnnnnnnnnnnnnnnnnnnnnnnnnnnnnnnnnnnnnnnnnnnnnnnnnnnnnnnnnnnnnnnnnnnnnnnnnnnnnnnnnnnnnnnnnnnnnnnnnnnnnnnnnnnnnnnnnnnnnnnnnnnnnnnnnnnnnnnnnnnnnnnnnnnnnnnnnnnnnnnnnnnnnnnnnnnnnnnnnnnnnnnnnnnnnnnnnnnnnnnnnnnnnnnnnnnnnnnnnnnnnnnnnnnnnnnnnnnnnnnnnnnnnnnnnnnnnnnnnnnnnnnnnnnnnnnnnnnnnnnnnnnnnnnnnnnnnnnnnnnnnnnnnnnnnnnnnnnnnnnnnnnnnnnnnnnnnnnnnnnnnnnnnnnnnnnnnnnnnnnnnnnnnnnnnnnnnnnnnnnnnnnnnnnnnnnnnnnnnnnnnnnnnnnnnnnnnnnnnnnnnnnnnnnnnnnnnnnnnnnnnnnnnnnnnnnnnnnnnnnnnnnnnnnnnnnnnnnnnnnnnnnnnnnnnnnnnnnnnnnnnnnnnnnnnnnnnnnnnnnnnnnnnnnnnnnnnnnnnnnnnnnnnnnnnnnnnnnnnnnnnnnnnnnnnnnnnnnnnnnnnnnnnnnnnnnnnnnnnnnnnnnnnnnnnnnnnnnnnnnnnnnnnnnnnnnnnnnnnnnnnnnnnnnnnnnnnnnnnnnnnnnnnnnnnnnnnnnnnnnnnnnnnnnnnnnnnnnnnnnnnnnnnnnnnnnnnnnnnnnnnnnnnnnnnnnnnnnnnnnnnnnnnnnnnnnnnnnnnnnnnnnnnnnnnnnnnnnnnnnnnnnnnnnnnnnnnnnnnnnnnnnnnnnnnnnnnnnnnnnnnnnnnnnnnnnnnnnnnnnnnnnnnnnnnnnnnnnnnnnnnnnnnnnnnnnnnnnnnnnnnnnnnnnnnnnnnnnnnnnnnnnnnnnnnnnnnnnnnnnnnnnnnnnnnnnnnnnnnnnnnnnnnnnnnnnnnnnnnnnnnnnnnnnnnnnnnnnnnnnnnnnnnnnnnnnnnnnnnnnnnnnnnnnnnnnnnnnnnnnnnnnnnnnnnnnnnnnnnnnnnnnnnnnnnnnnnnnnnnnnnnnnnnnnnnnnnnnnnnnnnnnnnnnnnnnnnnnnnnnnnnnnnnnnnnnnnnnnnnnnnnnnnnnnnnnnnnnnnnnnnnnnnnnnnnnnnnnnnnnnnnnnnnnnnnnnnnnnnnnnnnnnnnnnnnnnnnnnnnnnnnnnnnnnnnnnnnnnnnnnnnnnnnnnnnnnnnnnnnnnnnnnnnnnnnnnnnnnnnnnnnnnnnnnnnnnnnnnnnnnnnnnnnnnnnnnnnnnnnnnnnnnnnnnnnnnnnnnnnnnnnnnnnnnnnnnnnnnnnnnnnnnnnnnnnnnnnnnnnnnnnnnnnnnnnnnnnnnnnnnnnnnnnnnnnnnnnnnnnnnnnnnnnnnnnnnnnnnnnnnnnnnnnnnnnnnnnnnnnnnnnnnnnnnnnnnnnnnnnnnnnnnnnnnnnnnnnnnnnnnnnnnnnnnnnnnnnnnnnnnnnnnnnnnnnnnnnnnnnnnnnnnnnnnnnnnnnnnnnnnnnnnnnnnnnnnnnnnnnnnnnnnnnnnnnnnnnnnnnnnnnnnnnnnnnnnnnnnnnnnnnnnnnnnnnnnnnnnnnnnnnnnnnnnnnnnnnnnnnnnnnnnnnnnnnnnnnnnnnnnnnnnnnnnnnnnnnnnnnnnnnnnnnnnnnnnnnnnnnnnnnnnnnnnnnnnnnnnnnnnnnnnnnnnnnnnnnnnnnnnnnnnnnnnnnnnnnnnnnnnnnnnnnnnnnnnnnnnnnnnnnnnnnnnnnnnnnnnnnnnnnnnnnnnnnnnnnnnnnnnnnnnnnnnnnnnnnnnnnnnnnnnnnnnnnnnnnnnnnnnnnnnnnnnnnnnnnnnnnnnnnnnnnnnnnnnnnnnnnnnnnnnnnnnnnnnnnnnnnnnnnnnnnnnnnnnnnnnnnnnnnnnnnnnnnnnnnnnnnnnnnnnnnnnnnnnnnnnnnnnnnnnnnnnnnnnnnnnnnnnnnnnnnnnnnnnnnnnnnnnnnnnnnnnnnnnnnnnnnnnnnnnnnnnnnnnnnnnnnnnnnnnnnnnnnnnnnnnnnnnnnnnnnnnnnnnnnnnnnnnnnnnnnnnnnnnnnnnnnnnnnnnnnnnnnnnnnnnnnnnnnnnnnnnnnnnnnnnnnnnnnnnnnnnnnnnnnnnnnnnnnnnnnnnnnnnnnnnnnnnnnnnnnnnnnnnnnnnnnnnnnnnnnnnnnnnnnnnnnnnnnnnnnnnnnnnnnnnnnnnnnnnnnnnnnnnnnnnnnnnnnnnnnnnnnnnnnnnnnnnnnnnnnnnnnnnnnnnnnnnnnnnnnnnnnnnnnnnnnnnnnnnnnnnnnnnnnnnnnnnnnnnnnnnnnnnnnnnnnnnnnnnnnnnnnnnnnnnnnnnnnnnnnnnnnnnnnnnnnnnnnnnnnnnnnnnnnnnnnnnnnnnnnnnnnnnnnnnnnnnnnnnnnnnnnnnnnnnnnnnnnnnnnnnnnnnnnnnnnnnnnnnnnnnnnnnnnnnnnnnnnnnnnnnnnnnnnnnnnnnnnnnnnnnnnnnnnnnnnnnnnnnnnnnnnnnnnnnnnnnnnnnnnnnnnnnnnnnnnnnnnnnnnnnnnnnnnnnnnnnnnnnnnnnnnnnnnnnnnnnnnnnnnnnnnnnnnnnnnnnnnnnnnnnnnnnnnnnnnnnnnnnnnnnnnnnnnnnnnnnnnnnnnnnnnnnnnnnnnnnnnnnnnnnnnnnnnnnnnnnnnnnnnnnnnnnnnnnnnnnnnnnnnnnnnnnnnnnnnnnnnnnnnnnnnnnnnnnnnnnnnnnnnnnnnnnnnnnnnnnnnnnnnnnnnnnnnnnnnnnnnnnnnnnnnnnnnnnnnnnnnnnnnnnnnnnnnnnnnnnnnnnnnnnnnnnnnnnnnnnnnnnnnnnnnnnnnnnnnnnnnnnnnnnnnnnnnnnnnnnnnnnnnnnnnnnnnnnnnnnnnnnnnnnnnnnnnnnnnnnnnnnnnnnnnnnnnnnnnnnnnnnnnnnnnnnnnnnnnnnnnnnnnnnnnnnnnnnnnnnnnnnnnnnnnnnnnnnnnnnnnnnnnnnnnnnnnnnnnnnnngagattacttttataacctagaaattataagtaggtaactgtaattaaatgtataaacttagtagggtaggccctccctctatatattatttttaaaggtaaggtcttctttaaatcatggtttaaaggccttcctagtaactagcgctttaaagttagtctaaatagatagatattagataaaataggcctttattagttataaaagctctttattctaactacttcttcttatataaagggagtatattaacttttagtactcgatagctatagaagttatttaaccctaaaattcgataagatttataagaaaaataagattatattaatttatatactactatatttatcttaccttttataatcctttaatattagttattttataatagtaaaacggttatatagctaattagttaagataaaaatatagactaggattaattatattaataaacttaagttcttagaagtatacccctctatataaattaaagctttaaaattagagataattaaaaatagcttcttagtagctagtttaataccttttttacctaattaggtacttttaaagctaaatatctagctttaaatacctaccccctctctaagctagggtagtgacttaagctagaattttatactaaaaatccctactactaggaaagatctatgttaatnnnnnnnnnnnnnnnnnnnnnnnnnnnnnnnnnnnnnnnnnnnnnnnnnnnnnnnnnnnnnnnnnnnnnnnnnnnnnnnnnnnnnnnnnnnnnnnnnnnnnnnnnnnnnnnnnnnnnnnnnnnnnnnnnnnnnnnnnnnnnnnnnnnnnnnnnnnnnnnnnnnnnnnnnnnnnnnnnnnnnnnnnnnnnnnnnnnnnnnnnnnnnnnnnnnngagactggatttgcaataggattaactgtaacggtaaaggttataataagaagtgaatactacggtcggagattacttttataacccggaaatcgcgagtgggtgactgcaattaaatgtataaactcggcaggatgggccctccctctgtgtattatttttaaaggtaaggtcttccttaaatcatggtttaaaggccttcctagcgactagcgctttgaagttagtctaaatgggtagatatcagatgaaataggccttcgttggctgtaaaagctctttattctaactacttcttcttgtataaagggagtatatcgacttttggtactcgatggccatggaagccatttaaccctaaaattcgatgagatttgtgagaaaaataagattataccaatttgtatgccactgcatttatcttaccttttacaacccctcgatatcggttgttttgcggtggtaaaacggtcgtacggccggttggttgagataaaaatgcggactgggattaaccatattgataaacttgagttcttagaagcatatccctctgtacgaattgaagctttaaaattggagacaattaaaaatagcttcttagcagctggtttaatacctttttcacctaatcgggtactttcaaaactcaatattcatcttcgaataccaaccccccctcccagcaggggtagcgattcaagccggaattttaccccaaaaaccccttttaatggcaaagatctacgtcgataggcttcgtcaatcaaagctttacttcgtacccaatctcgaagcctaataagcccttctaagtgtgcattagatcaacttgtcaaaggctgctagattgcaatgcatagtgctattctactagcaaaagaaaacaaggatttacgggatgaaaatgagaataagaagcaaaagcgggctagatctagacggcagatacctgccgaagaaggcctctcagttcaagaagcttctgaaataattgctagactggtggaagcatcagaaacacccctatatcccccggacggaagcactcaatcagggttggaaccacgaccacgggctgcaccaaggtgtagtgggtgtggaaagatagggcataagatcaataggtgttcagataaatgatcctttttagtttaattaatttaatggcgttttggttgaaatatattccttagaaaactatactcttgggtagggtggcggctcgcttacagtggcggctcgcttaccgattacgttagctagttattatgtcaaggatgacttgacgttatcaactaattagtcatagttaattttgccaacgcaatggccagctaacatcgcaaacgatcgagacaacgcaatggccagctaacatcgcaaacgatcgagacaccaagagtttggttgttgaattaaaatcagtgatacgcagtgcatatccaggaaccttggaaggtaatggcgtccaccgtaagttgtaaaatatagaaaatccaatgtgatgttatcgtacaaggcagattatagcaaaagaaaagaaatgccgtcaaagacgacaggatatctagccaaaagtagagaaaatcaatcaaaatgggcatgctctcccaccgcagccgaaaacaacccgaaaatgctttatagcttcatgccaaacatgccgtgaacacgcaaactctggcgcatactcaaatcaagcataatctcctcgctaccaccggggatagcataggcacgcacatcacggtacagtctctcgatcttaccgccctgaccgccgcggctgtaacttaaaccaccaaagatctgactagcctcgcgagcgcagaactcaaagcattgcgttgactgcgccttcaatccagcaatggcaccgccgagcttgagcatagcctcggtctcctccatagactgacactggaagatgatgttctcaagccagttgtaggtggcctcgatctggcgagccatatgggcgagtttcatgcgaataaccgggtggtcgatgagacgcttgccgaaggttttgcgcttatgtgcgtatttcatggactcctcatagcagacgcgcgagaagcgcacgcactggatcacaatgccgatacgctcgtgattgaagtttgtcatgataaccttgaagccctggttctccttgccgatcaggttctccacgggaaccttgacatcctcgaatgtgacataggtcgtaccgctagaccacacaccctggcagtccatgcgtcgggtgctaacgccaccggcttcacgctctataagcagcacgctgaggccgttcatgccatccttgccggtgcgcacagcggtcgtgaaataatcagcgtagataccgttggtgatccacttcttctcgccgttgacaatgtagtgcttgccgtcctcggtgagcttggcctcgcaacccaagtttgcgacgtcactacccgcatcgggctcggtgatggcgaggcaaatgcgcttgtcgccggccaagatacccggcaggattcggtcgacgaggggcttcttgccgaacttgaccaatggcgggcagccaattccgtagccaccgatcaggttccacaccagaccaccgctgccgacacgcgacagctcgtcggtcagaagcatctcgtggaacaaatcccaccggtctgctgacacagacttcacgcggtatggggtgtgcttctgggggaaatggacacccagcagtccagccaggtagccccgctcgcccatctgcttgtagatgtgagcgggcacttccttggcctcgtcccattcggtcacatatggctcgatctcggactcgacccactggcggacctcgtctcgcagtgcggcatgggattcactgaagtagggggatgcatactatgagcgccatatagattagcttcggtgcaaccgtaaaaggcacagatcgatgatatagagcgaaagcaagacttacaccttggtaccacgaggggtcggcgaatgggatcaactctccataagggtcctggggagcgccgatggcaggtggtgtcacggaagactcagaaatggtaggtttcggctcgggggcagcctttttcggggttggcgctggtgccgggggtgccgagggtgccgagggtgccggtgccgtcttctttgtatccaacgaaccgatctgcagctgacccttgtacttcttcagaatgccctcgttgtggtatttccagaactgtttcgaagcgtcctttcccgcaactcgctggagaactagatatacactgtcaacgtgaattcatcggacgtagcggatgctctcggaccaacgtactcttctttccacctgttcagaacaagaagtgttaacatgtgattccctgcatttgcacacatgagttcacttaccagggtgctcatcttggaacttggaaacatcgtagacatcttcatcgataatgacccagggactgtcacccttgctatgcgaggcgacatcctctttgctaaatgtctttgccatggcgatggggggaggagatttgaggaatgaaagaaaaaaaaaaggcgtacaacaaatatttatactaagaccaagcaataaccatttgggagaaagaagagattttcaagtccggggaagctggggaatatatgagttctcagacgaggtatggggcaagaaacaaattccgccaagttcgggcgatattccaagtcaggacatgacgatgcaccaaaaggggcctcggaccgtgatagtaccagttcacatgcctccacacagagtcgaccttgggatcttacgttgtagcagtcgatgtttcattggttgccgatcatttcggtcatcgccgttgacagacagtttattggctcgtgctgcgtcataaatggaaatgccgaggcataacagttctctggtctgggtgcagtggatggctgagtcagccgagaccgggcatgtgagcatgtgaatgatgagcatgtaaacaggacggagtctgccaatattgatatctcgatagttatatgatgtaactgtcattatagtcacttgatacaattgattagttccggttcatagtttcgtcactatgtacccccggcatgtgcatgttctactacgaaaccatcaagcggtgccccggctgcggtcgagtgcatataatacgacaagaaagatggccaatttaaaagtaacataggaactttcatatcaatcacagtgacggaaagctatactagcccccaaatagatcacgtcggcgtagacagcctgattagtctagtaatacatccagcatcgagattctatgccgcaaaaacactctactgcccctcaccgtctgactcgtatgagaaatccctaggaacaggtgcatcctctacgccttcttcgtcctcatccaccgccgtcagaacaccggcagcagcggcagcaccgcctgacgtggctgcggatagagcagcccgagcaccagcccgttgaggcgtctggagagcagcggttccaattgcggcctgcagacggtcttggagggtttcggtcggaggaggcggttggcgagcctctttgctggccttcaattcaatgacctcgcgaggctcgtcaggttgcttgtcgagaacaacgacaacaccaccagtgggctggagttttgttagcattggattcattagcacaaataagaatgaacataccctcttgaccggttcataccgcgggtcagggaaagtgagatacttgagctgagctggtagtacccttgacaggttgtccagctcgtacccgaccttctcccgctctgccttcttcttctgcacatctgcagcaaccttctctgtctccttgccttcttctccctcctctttaggagcatcatctgtgtccattgtgtccagcagctgatcagtagccttgggtgttgtgggcgcttggtcaatgtccatgctctcacggcgtgcctgcttctcccgacgctgcgcgcgacgcttggcctgggcagtggtagaaagaacagcagtcttgaccttctctggggcctcctcggtcttcacttgttgctcaggggggtagtcgaagagactggggcgggtgttgctgtggaacttgaagtgtgggacttcgagcttctggtcgacaccgattacggatgttggcgtgaagctaagcgacaagaagtgtgtgagagggaaccagtaccagtactgcacgaagaccgcaacacccacgataccaggcatattaaggttacccgtctgcgtctgcaggctaatagtgcagtttcggccaccagcgtcaatgataccgagagcgatggcacaaccaaacttagccatagcatcctcgtggcggtcaccaagcatcttcatcatggccttgcgaaggctggtaacacgagggttcatggcctcgttctgctggacgagaaccatggcaagagagatcagagcaccttgacgaacaaagtcggtagagtccttgagcataggctccaggaggtcgatagcttcgtctaatccggtgccggcgcaggagataccgagcgccatggcggcaccgtatcggacgtgagggttgtatgactcggaaagcagctccaccatacgaggtacactctggtgcttgcggaacaagatgaatcccaagctgagcacagcaactcggcgcacatcgtcattaacatcactgacagcgacatgcagaagcttacgaactgccttgttgctgccagtgccacagtaagctagggcaatggtcatgataccaccgtagcgcagagttgggtcggggtccccgagaaggccgttgatgagctcgtcggcagcttcctggcgtccgaacatgatcaaagccatacccatagctagaccacgaacaatcttctcgtgctgtgtctcgtgtgcgtactggatcatgtcctcaagagccttcatgttaccggtaccaagcatgatgagacccatggcgagaccgacagcctcgccattgagagcggaatcggtgtaaagaacgctccgcaggtcatcgtaaatgccttcgtcgcctgtcgccatacccgcaacaccgagaccaagagcaccaccatgctgaaccacctcttccgtggccttcttgaaatggtcacgaatgatgtcaactgccatcccgccgtggttggcgtagatgagaccaaaggcgtaaagggaaccaccttggctgtagacagaccctgagcccccaactccagcaatgtgttcccggggcaggtaaggctgtaggagcttctgaccttggctgaggttgccgcggtgaatacagcccaatgcagcagtggctgtgaacttcgaccaatttacggccttgcccagccactccaggttatcacggaagaacttatcgtgagtagttcctgcatgcatgaacgcatttgaaagtgtcacagcggtgtggaagatagaattgcgagcctcaaggctgtcacgaatcttgttcagaatcgcgatgtcagccttgttgttccggtataagaattccagattcagctggatggtcttgattccatcaaggatcgaaagaatgttcttgaatgcagtcgccgctgcctctggtagttctacatgtttatccgagggccgggaagagctcccctggtcttcgagtaatgcgtcagactctgttggctcgctgtcctcttcattattcttttccgcctcgtcttcagggacaagttcagcaatctcttgccgaaccttctgaaggaactcctgagtgctgttgtcgtaaaggtcgaaagaaatttgataggcaacggcgagagatcgcgcatctcccttctcaacgagctggcgaagaatagcagaggccatggagtgttcattaagatagacaacacatttagcgattgagaagaagtcgggtgccgggatttcattaagaagttccaaaattagtttgaggatctagaaaatgaaaccttggttagccgactcagctaaaatggtagatatatttggtgaacgaacctcgctgcggaacgctcgttcttggacaatgcccatgcagatatccaggacatattccatgagctcctcgctaccatgggagtcaccatcttcctgcttttcgtcgctactggcgcgaaggatggccatgcggagcacatccaagttctttgcctcgatggcgattccaatgacttgacggtatcgcttctgtctgaagcatgcttcaaacaattgctcaatgacggtctgcagttgtccctggacaccacgcttcaacacgagagagttttcctcgtgctgaacgctagtgtcatcgccaccagggtgtgcggcgtccacaccgggaacctccgcgcgagaaagtaacgatttggaagggagtgcggatttggaaaaaggtgtaataggagaagtgaggctggcggatgtgctggtggcaccgtcgcctgatgctgggaatgcagtgtttagattggctggttggtcacccgcgataggccgttgagcggcagatagagagacaaaggtatcgacacatttagctacatggcaaaacatgttagtatcaaagagagacatgctgtggatcttcttcaacataccgataatggtctcctcatactctccgccgttttccaacttgaacagctttccagcacctagagcaagaaccatactctcgttatattcctgcagatgataatataccttcgatgcgactagtgctgcaaggccgcgttccggaaatgattcatcttcgtaaagagcctcactagatagatagtcagcaggggcctagtagccagtcagactcgggagaaatgacgcaaaaaccgagataatgcttattctcacgagtctagtcaaaacaaactcacatttcaggaactgcgttgacaacctctgtccagagatgatcgatttgagaatctaatgtcctcaaagcaaagaccttgagctctgggtcaggctcggagaggaagccaaccaaaccggcggccgatacgagtccgaccatctttattgagagaggattcgcgtcgcgagtttctggacggaatttgaggagtgataagtgtattgttgctgttgtgatgaagcaacgtcaatcgggagagagcttagaacagcaaatcagccccagcgcagagcaaggtgtcaagggagatttagtcaccccaaataatgagaatatgacaagaaagacggaatttgattaaatgaaagagacgaaatggatgaagtgcacatacgaatggaagctgggagcagttgtcagaagctttgctggcgcgagagcaacgtcaacgcctgagcggagctgactgtacatgacgggtcacgtggacggcgctcggtcagctgcgagctgcctgagtccgcggtaaacagcccatcacctatcgagtggactatttctttctgatccgatcttagattaaaaccgctaaatagtcttcctacgccggattgccgcgagaaagctctagccatccctccggtcgaagcttggccatcctccacggtccttcctctgtcatgtcgacgcttcttcaacaatctttcgatagtaagaggctgccgccagttccggctcgaatttcaatgttttaccatgaccctcttttacatgttgaacgtcaggcaaaacacatacaacgcaatctccaactcctgatcgatgctcaaagcgaaggccttctctccgggctgcaagcggacgatagctcgaccggaaattcgaccccaaaattgtcgtctagtgcggcccgatcacaatccccttccacggtgcctgctaggcagcccacgcctaagaaaatcgggcttcgggctgcccgggagggcatatttcaatcaatatatgatctactgaagttgcgggaagaagaacgagagattctgatatctcagaccaatgaaagagagaacgcgctacatgatatccaaagtttcctctcaagaaggaatggtctggaagacgctatcactactatacatggagacgaggagagccgacgttcaaagcagctagaacaagaggctcggaatctcgagactgacattcatgaattggagaccaggctgtatgagatgaaagctaaacatcggcatctcgcgaacgagatatcacatattaacaactcggtcgatgccaagctctcttcttatactcaatctttgtctttactcgactccgacatccgaaactacctccgtgaccctcctatccaaccgttatcgcaaagctcaggcgaatctacctttcactctttgaatcccaaacgtcgcacacttgacatggcccaggagcattggaacacagaacaagtcggtttgcacagtaggcaacagcaagtggatgcggaaatactggcactagaagaaggaggcggaatatggaaacaagtggtgtccgctgttacaagcttcgagaagcgcttgcaagccaacatgcggcattatgttgagatgaccacaccaacgaccgagtcagaagtgtccacaccaacaggttataaagacgggctggtgagaagtattctggatgacttaaagagtaccactcaccgggtcgaatcacatctggagctcgctgaggataaggattggaagctattagtttgctgcattgcagcggagctagaggccctgcgagaggcaaggggcttgcttcttcccgccttcggcctcccggtgcatgaagatgatgcacccctgaattccatatcccccaaagatcctctaatacaccacgagttggaggtcgaacatgaggacacccgtccggatcagctggaaaatgacgacccagaacctccagccgatctgctcaaggatgcagaccctaatcattccgatgccaggtcggaagatgatgagccagatccgtcatggctaacttgatcaggatctctagtactattaaatgaagcagagctcattgcatgatttacacagcatcttccagccaactgcatcttttcgtcttataaatttatttctagtgttgtcatctcatatcgataaattggattgttacattatatgcccgtatctcgcatacttgtacttgacgatgtgtaaattgtgtctagttggtcttccgaattattagggtgggcggatcagcgaaacctcgcccctcgacctcttcctgcatagcacagcacaccgtaagctttgcattctaaaaacaaagcaatatgaaataaactagacctggtcatggatcttccaacagcaagcttctcctttgtccttccatctgtttacgatggcaacaaactcgaatgccgcatttacctcccgcccgcgctcaaaaatatagaatcaccaacaacctggtccaaccgcggtgccattgtcgcgcacccatacgcaactctaggaggatgctacgatgatccagtcgtcgatttcattggcagtgagcttatacaagctggctgcatcctgggaaccttcaactttcggtataatcattcattgaacactccgccacgacaaagttgctaacgaataacaaatagtggagcgggtaactcccaaggacgaacaagctggactgcaaagcccgagcttggtgactatgtgtcgttctacgggttcatgttgcaatatctgcactttctcaagctcgtattggcctcgagggaacaagtcgacccttcaaagcctcaaaaagccatcgacggagtaggaaatagctcagatatttgtcttatcctcggtggatattcatatgggtctttgattgcgtcacatgtaccgacccttgataccatgctcggccttttccaattcacgccaacgacaacctctacaaatagggccacacccatacacgagattaggaacacagcaaaacggatagccgcattgtccctggagagacttcaaataagtcacagtctggccgacgatccagacctcggtgcattgacgacatctatctcctatcttctcgtgtctccgctcttgcccccgattagccaattcctgacagcattctcgactttatcgctgaatctcaaaacagagacccctaacggcccccacatcccctgcccgcgtccagcagatcagcagagcacgcataatactctggcactgtttggggaccaggataccttcacatctactgggaaactgcagagatggtcagataaaatggtgaatatggaacgcagtaagttccagtttcggatgattgatggcgcgggccacttctggcgtgagaatggagtcgaggtgcgagcaagacatgcactgaaagagtggctctgtcagatatgataatcttgtactgttggttatttggctgttcaattatgctcaatatggtgcggcaatgataacaacctgacctcgagaccaagtgtcagactgggatatggccccaaacaggaaccttggcttttgttacatgactctctactatgatagttccaatgcccattcttccaggtattgggatcatcatatgcacatgagtgacttttcttttatatgcaaattgattggaagtcgctcttcctctaatttagcgtattgctgatatcggtacagtactgaagcgagctccgacacgcacgtagatgtatgaggttttgactatattaatccgccgtacgaccaagtagtaactatagttacccctacaggatagaatggttagaataagagagtggataactacatcatttctagaccatcaaagtcggcttataagtacccaaatcaagccccattatctcgatgcaaaaattctcaattcttcacataggatgtcaatgtttacatctactcaaccttctttgatgctgctcggactcctccattcacatcaacatgcacccctcgcaaaacatacccatctcgctgcgcctcatcccactgttgccgtattaggtctgaccgagctgtggaacgctctaaaatccgtaccgagtactccttcggcactcggatcgcgccctccataaaaccttcgtcgctgatatccaagggaacctcgtttcccttatcatctaacggcaaccggaattcataggcccagatgagattggacaccgccaagaagagcccattctcagccaagtgaatccccgggcaaatacgacggccagcgccaaaggtaaaatggtcgcgggcgaagatatcaccacctgcggcatacaccgcagaacgttgcgggtgattaaggtagcgctcaggtctgaagccaaagggatctgggaagcgttcatggtcccagtgcagagcattcagattagcgaggagaatggtacccttaggaatctgatggtcgcggtagtgtacgtccccatccgccatgcgccgaagccccgtagtagcgaccggacatagccgcagagtctctttgataacagccttgatgtagggcatttccggctcatcggccagggtcgccatccgcccatcacccaggacccgcgtcacctcctcgaatgcccgtgcctgtgcctctgggaacattgccaggtaccggatcatgccattcaacgcgctggcggtcgtctcagctcccgcttcggggacagcactggctaaccatgagatactctcctcctctagaccatattcgcggtagtttgactccatgaggtccttggcaaaacactctggggcattatctgcggcgatacgttccttcagattgttccagtgcctcattttgttgccgtgcatcttttcagccatgaacttggcctttggccacgaggggaacaagaaccgcggcagccagttcagaggtgggaatacatcaatccagaagactccaggactcagaatgatagacagcattcgcatgttgccgtagacgtcgcggacttcctggcagtcccacttggggattcggagcccgtatgccgatgtcatgactatggaaaaggtcatgcggcggatatgtctgtagaagtcggtgctattgcgcccctcattgttcgcttcatggctgagatcccagaggagttgcttgatttcaaactcctggcttgggatgaatgctgcggatgccttggcgttgaggagctgtttcagaaacgcgtgaagccgcttccattttgtactataagtcatgggcagcacaccctcacccctcaggcagaactcttgtgcgatgggcaggggcggtttgccggatgtgacggcggcctatgtgccaattagcatctagttctgcttcttgtgctgttgggaaggatgcaagtgtttggggatggaattacctgtctatcaaagacttccttgactgcatctgggctgttaaagaacacccagttataccaacccacgcgaaccttgaatgtatccccatactgcgccgcccagcggttcaacagctgccgaggccgggcgggcaggtccagcccaatgccaaccaatggccagcccgagggaccgggtatattggcaagaggcttggtagtcttgcgagagtaccggactgtccaaagtagtagttggaagagtaagaatgcgcaggcaaagccaaacagtacagttggcctggaaattgcggagacaaagcgaggggaaagaagcagttccacagcatcagtcttgtaaaaatccattgcgatggtttttataactccttacagtgggttgattgaagaagtaggagaaaattggatcaaagtccaagattcctaggagttcctagagtatccttttatgtccttaataacgtgagcactgtagcacttacttcaccaaaccccacaaattcatgagttttctcgtgaatttcaactttacttgtccaagcacgaaagcatcatcaaccaaatggagggtcatgtccgttgggaatacggccctcctccgccctttgacaaatccccgagcattactgacgacgtattttccgctccatattcctgcatgtgcatagtgcttgctttagctttcagagagccagtccaattagcccgaggaaagcagaacatcaaccaaatcgaggcttatgtccgttaggaatcccgcttacttctcacccttcctatatccacgagaattgatgacgacttactttctactccatatccatacatatgcatatcggcctctccgtcgttgaggtggttgacccactccaacagggaagaaatgctatccatctaatcaagaaatgtccgttagaattacggctccatctgcccgcccatatattcacggaccttactccgtaccaacgaattatattctgctccaaatctctatgtatgcatatctagcctttccgaagctgacgtggctagtcaaaggtaggtgaaaaatccgtatgatcacttagagacacttgggatatactaatgcataaagtagcttccacctcgaatattaacggctcagaaaagcataacgggtatcatgaagaagtagatgtacatttagtgggtagtatacctcatatacctcatatttatgagtaaacaatgaattataattgtgtaatatctagattctgtgttctagattcaagcggaaggcatgcatcccaattagggttaggtgaagccgatgacgtcactcttttgatatacggtaagggtccagtccagggtcatgtacggtatggtacgggtatggaatcgttctgaaatttataccgcgtgtattgttaggttataaaccaaatgtatgcaagcgttgtacttcgcataagcacgaatgcaactccactgatagacacgcggccgttccctagtcgtcccgttaaactggggatggaacctatattttaaaatctgttaacgaagaaccccgagcactcaaacgggtttatcgtgacgccaaatcgccataattggtacgaggagaaacgcagctcccactatcattgccattccactgaagatctgcaatccaaggaagccgttatctcccccatggccctcaatgagacctgcgatcggcgctccaatcagaacccccagactagtggcaaaccactgcatacccatgcgcgtcccaataaccgagggtgttggtgagacgatgggatgagcgatgaccaatgggttggcggagattaataccccggagaagatgccaaaaaggacacagaatacgatgaaagcggggatagagtggatacctgtccagccgaagaggatcacggctgaggcgaggacgctagtgagcagaacagtgctggcgcccagatgaggggtgagcaaggaggagccgatacgaccgaaggcggagcccgcgttgagaattgaaaccatgtagaaactcagctcggtggaggtgtgcagggcaaccgaggcaaaggtgggcaagtagaagagcgggatgaagtaggccataaacatgaaaaaattggcgaccgcgtaggcattgaagctccattcccgaaaggcatgccagtggatgagccgtcgaggggcaccatggcgagctttggtggtggccattagaagggggatggcgatgcacgagcaggccagctggatgaagcccatagcacgcactgtccacggaaatccaattgacggctgaagtcggataaagatgacggggaagataaccccacctagattgtgtcgatgtcagatttggtcctggtaatcggaacgaagaaaaacgaagagtagaagggtcaaatgaccgtaccaacactggcgccggaggtgactagtccaacagcaataccgcgtcgcgtagtaaagagggtggaaaccagagaaaggctaggcacgtagatcagaccactgcctaagcccacacacactccttgcgaaagcatcacttggtaatattcggtggacaaactcagcatcatgagccctagtgtagtcaagaagcaaccggcgatcatcagatgatgcaagtatccacgatcgaacaggggaccggcaatagccccagtggaaatgagtagaaaggcactgacggtgccgacccaggcgattcgggacggagagctgtcgcgcaacaggtcggattggtagtagctttgaaaggcaccaaacgcagtcgagaatccccatgtggtgacgaacagaagaaatgaagcaaatacgcccgaccaggcggccaggccaccatttggcggcgcagcgggaagactagactcctgcgtaggtccattggcccccatagcgattgatagccaatttcgtgttttttgagatgcggagataaagataaagagaaaagaaacagtgaattatccaacatatttaaatacccagcccgccccttttcctcgcaggtcggagaatcccccaggcgccagattcggaaaagcaacaaagaaaaaagtcccccgaatttgtcatcatgcagtatgtggacatccttgtcacctgcaagtcacataccgagggccgagcattaatatcttttgcaggtctgtaatgccatctacgcgtttgtgtgcaaacacttggctctccaatcccgagaaggctattcctggccaattgattattatctgtacctggcttggggcttcacccaagcatgtcggaaaatacaccgacctctatcggtctattgcaccacacgcccggattttgttgatcgagtctgatgtctcgatattggtgagcagctacgcacgccaacgtcgccggatccgacctgtggtagacatcgtcctggagactttagcagagacagaaaccagctctgacgacaacgcaccgcgaatcctactgcataccttctcaaatggaggtaccaacaccgcaacccaacttctgatcatactccgtgaggtcgcctccaagccgctaccattgatagggctggttctggacagtacgcctgccaaggggacatactggaagtcgtacaatgcaatggtcttctcccttcctcccgcgtctcgattcgtgggctcaatggtagtccactgtctattggtactactgtacacctggatagcatgtggaaacgaaaacccagcgagtctgatgcgtcgtaccctcctggacaaggatactgtcggccctgcgcctcagagacccgaccccgaagctaggggatacatatattacatgtactcgaaagaggatcgtctgactgactggatggatgtctgggaacatgcagggaaggctagggaggaggggtggaaggtcaaagaggtcgtctttaaaggcaccggccattgtgcacacatgccctttgatccgatgcggtatacggagtgtgtagagcaggcatggggtgcaatcagcaagcctgagtccaagctgtagttgacttgctgacctatttttgatcgtgtcttccttatatctatgaagcagaggtgggaatttgtggaaatatcaagatggttcaaattgcagccacagctcatttattgaagactcccaattttcactaagagaccacaatcttactccattctacacacacaagtagtaaggaatcttcctcggatcaatcgaacgccagataaaaggcataccctgcgataaaccatcctcgtcgaattgccttgtccggatttcttcactgatagctaacatcgtcgcccgaaacttcccctcggcagcatgaagatcgcttccagccgggcctaagaattcggtctcccagaacatatgcggaaggtttcctttctgctcatccaacaatggtcggttgaacctgacgaggagcgaagcttgcttcagtgcctcggtctcgttatgcagccacgggatcagcgattcgatgccccctttagtctcaggaagtggctggttgaaggaggagggatgcaacggaagcacacccagggcctccccgacagtcgcaccattgagtgcatgatgcgcaatcccagagaggaatgccatgtgggagagaatcgagacaagatcctcgcgcgcgaataatggggcagggaaaaagtcaatgacttgagcctcactggtggcctccatgatccaggcttgtagttcgtggtcgctgcccatcagactgctcttggggtaggaatattccacgaaagaacgagtgaagtcttcgatggcttgcaccatgggtgccacagtctcatagaatgggaaggagcggagcggaggcccatacgcgcaatctagaagaccacggtctgcgaaatcccgataaaaattcgtggaccggaagtgacccgcgtgctcccaataggcgtctgttgcgaacttcttgccggcccagtttggaaccgcgaaggagctgtcgtagaaaccgccttcattgaaaaggaattcctcaccaatgggtcgaaccgcatatgcctgatacattactttgaataattagctgcgttgaattttgaaacgccgaagggagagcaacatacagcggtcaaggtatccacggacaggatgccgcgagctcatggttcgcaaggcagcctggtgcacgggctcagcgacatcatgtgtatttgctagatggtatagctgggaatggaagagatcgttcatgccaaaggccattttggcgaaaagccagtcatttgcgtcgtcccgtggcgtatatgtaaggtttttccccatgttagtcttgatagccaatggaaggaaatcgccagatccaggatggatatagaaatacgcggtacaagcggctgtccagcgcccaggagtcttggggtaaggggcttgataggaatggtcagcatagaagagacgtccttcctggtgtagatccgccagtgttcgaccctcagccaggtgttgcaccaccccatcttctactggaaaagggagactgccaattctgggatgtaggcgtcgaaccacgtagggattagtagaaagcctctccatggagaaaagcagatcttgggtccagttggtcagcatcccgggggatacaccgtccgggagtgaggaggcccattgatctttgtaaagaatctcatagctagagagtgattgtatgccccccaccttatatgattagctagggcccattttagacaaagggacttctgccggcataccttaatcagtgctgcagcggccttgtccaactcaaggtagacgttgttggtgacatattccacatctttgaaccacgcaaccctgtctcgggctaccattgcttctcccagaaccccggtagggaagaaggatgtgtttccgagtaaagggggcccatagatatatcctgctcgagctagacgaatctcgtctactctttcccaggacctggtgtcaaacattggaaggctgtacttaggaccattgtcgtcgggaagtgcagcgaaaggtttcagaaccgactgaacggaaataattggccaagcaacagcattgccaatatagaggaatgatagcaaaagcttataaatagggaagagtgtcattttatatagagaatcaatgtcgttgtcggaaaagaaagcaggaacttgacatttttgatgggaatcaccgacatctatattcattccttgacttgaacgtaagtccccccctcacaatcagccccagtgaaactcatgccttctattttctgacattctacatatctccgctctcgtgaacggccgtgtttactccgatctatgacgaattaccagtgtgggcccagctggacgactcaacatctagcagtcctccaccgtccaaattaaatgcatgatgctgtaagtaagctttctgattattacgaggtcaaatatatttgcccaattgagccgtctgtctgaacaagataaagaaaaatgaatttttattcccgtacattatctaccctgccagccatgcacacaatgcacaaggtaaggcaaggttcctaatagagtcccttccccgatacactagaatgttgtcatttaaatcaagggtaattacaagaatgggtgcatgtctccttgaacaaacgtagattgctctctcattgattctcccatctaatcaccaaaacaatgaatcttgtcgccattatctgtttgtggcttaccgttgtctactgctatcccggcggatttgactgggaccaagctgctagatatcaccagcagcaagtccttcgtgatgacaatgaccgagggtttggcttgaacgagccgttcgtcccaattcccgctcatattctccccgagaagcagcccttcatcattgacggatccattcatttctacgaaaagcatctcaatggctccggcccagatgggagctaccgtcgctcatcttgtccggccgtgaattcgttggcaaaccgcggatatatcaatcggtccggaagaaatatcacttatgctgagctagcgcacgcagttcgccgagtgtggaacttcggggatgacaatgtgaaaacctctttccctcaaaatcaaagtataattcgcattcgtactcctgctgacttgtgggggtagagtatgttagtgctggcgccaacttttgcaatgcatggatggcctgaaacgattgatttggattacttcaatgcatgatacccatagctccccctggttccctcgtgctagacactaataagtattcctaggatgaccatgttcaatacgtgattaattgcccggccgcaccaacccgcaatgaccgcgcagtgggtgacaacattaacatcaacatgactctcttcgagtccctgttgtccttctccaaggatggcgaaaccttgtccctagaggatatggcggagcaccatcacctacgccacaaccaaagtaaaatcgagaacccggacttcatctttggcaatcaaggagcaatttgctcactgtaagtattaggtagtggccaatactccctaactaccctaggcctaatattcaagacatacgttctgacaaaggcagtgcccaatacacaaatatggtcggggttctcggcaagtttggtaaacatggccgaaccaccctattcattgacgatgtcaagactttctatcttgacgaggatattcctcggaactatgagcgcagagaagcacccgtgagttatactatgcttgtgcccttgtaaatagtatccttactaaaagacatgacagcattattctcccgagtcaaatgcaatgattgaccgcatggcgcatcatgttggctacactattcaacgaccgttcccggagggggatcagaatcccggtgtggacatttgtccgatgaaggcgcgattccagcacgaggattgtagctagaattgacaataatctctcatgatggtctggaagggatgaaaaactatagcaagcagatcagattgtggagtatattgatgtggcgaatgaatgagcggattattgtgctgtatacacacacctatgaggaaactttggcccagtctagagtaattgtccgagcacagcctggcttacacctataatattattagataggaggataacttgacactaggtacccatgcatgaagcttctaggaatatagtttctatgcgcgacagatggggcgatcgtagtcccggagggttaaacggtcctttctacataaggaccatgcaaaacaacgagaatgttccgaataagattatggtaactaggtatgcatgtcatcttttagtaaggtagcatacgaaaacatagcgcatctaggccctaaacatccagtggtaaaatgtcttatcttcttcccacataatacatcgaaaagcagggatcactacttagcgtacgagtacggtatgacaatcttacattcactgcagagtagcatcaaatgggcgcaattgcggatgcccgaagtgggccctgcatgagtggacgacatgcagggtaattatcttgattagaggacacctatagggaagtgtagttttgatccggcatgcaaggcgtcctctcattgttaatgataagtatgcaatttcacataaaaaatctcaatttcttgtctaagttgcgggctagaggctggatacagaaattatcgtgctcaagagtcaaatttcgatgatgttctgatatgagccagtcatctcgtctatagctttcctttggtaacttcagcgagagttctttgcgtatgcttgtaacaccaggcaggatccgccatatccgcccggatcccgtagttctcctccgcatcctccaacactgccatatccagggtggccacccccattccttcggtggaggtacccaaacggaccaatgggccggcatatggaatcgtgatttgggaaagaccgcagtagttcttgcccggtggtccgcctgcgttggcaaagaccacggcacaggtgttttcgaatgtgcgtgctgtcaaaatgctgtccagaaacagggacggcgcggacgggttttgccgacggcccgcctcggatgcaccgctgcgggtccacagagtgggaacaataataatcttcgcaccgttggacgtgagctcccgccatgcctcggggaaggccaagtcccagcaaactagcagaccgaccggacctaggggggtttggatgacctggtgggggctgtcgccggaagagcgaaggtaagctcgctcagttgggccccacagattttttttaatgtatgagcctagtatctccccagtattggagatgaagaaggtagcattttccaaaatgggtgtcgtgggtctctggtcggacttgtttatctctgtgacgtgtgctgaagatgcagatacgggtcggacgatggacccagggacaatgcagatattacattctttcgctaaggcctgatatcgatgcaaatagacctcccaatcctcacacaacgaggcaaagcgggggtctgtggggatccagttcgtcaagtgaaattcaggcaggacagcgagttgacatccctgagctgcagcctcacgaatgaagtttacagcgcgagcgaagttatcctcgggcctgaggggctagaaggtcatgtgtcagacactgaaataataatatggttgtcttgcattttccatttctgaagaattgtggatgtaatcttgccttaacatacagctgtattacagcaatcttgcaaaatggcggcatgatggttacaaaaagaatcaaaatgatcaagaactaaaagaaataacgaaatccaaggggcgagatagggttgcaaggatacccgtcttctttccaaaggttgcgaatttggatttgtcagaagtgggcccccggatattccgttacgggtactccgggcgggtactccgcatagccccgcgtttcaaatggtacttttgtattcggtttctgttaccgtccggtatgtaatgtatcatacctctttagtaaataccagtaagcaatctcacagatccagttctcaaataccgggaagggccgccgccatgccgatatagatctcaattccatattggccatgcatgcactttcaattccccgtttaggttgcatcaccgacgtacatatgttgaatccgtttgtttgactttttttcttatcttcatttctccccttgctttttactaaaagccttggtcatgatgcatgagtaactctatacaggtttctaggtggatttcgggagttgctttggatataatgacggaatatagtggattgaaggcattcttgctcaccttggaataactcttgcgccgacgaaactgataagatttctcatatagcttacttatacgcagtgattgaccttgctctgtgggtgtcaccgtgcacatccttcctcgagttcaaagttcaaaagtcccagctcattatcatcatgtcttctctccgtctagcaatgaccagtctgttaaccgggttgcgcccagaggtggtggaaaaacttcagtcggacaagactggctttcctcaaaagcaacatgtcttccatgcatccgacgttcctaaatggatgcaatgggacccgtttatccaacgaggataccgaacccagctgaatagtttcaagcggtgtttctggtccctattctatctacataatgaatcaatcaacacctggtcacacgtccttgcaggaatttatttcctcgccgttcttctcgccaccgactattggatcgcccaactgggactcaaagtgccattatcagacatacttgctattcagacgtatgttgccggcactgcagggtgtctcatattctccgtcagtctctccgttaatcaatcctttttacaaaatccagaagtacttaactgatcctcacaattctaggctaccttccacgcaaccaacgctcattcgcctgaagtcgctcatgccttcctcaaactagattacttcggaattgtgctcaccatctcaactacatgtatctcagtcgcttatttcgccctgcacggagaaccgaggctccaatgcgtctacattttcttcactgttctctgcgcagctatggtcttctgtatcacacttgatgtcggtatggatggtacacgtgctggtccatggaggtaagctctagcataatatcttctcatgtgttattgcagcatttcagttcaataacacctgttctttcctcacacagagcaactgtattcacccttcttgcggctagcggcctagcccctatcttccacgtcatctcgagcggttcccctcgcgatttcatccgcatcccttgggagactctcatagtaacctgttcttcatacgcaattggcacagtggcgtatctcttccggtttccagagcggtattggccggcgcaatttgatattatcgtgagtctgattcatgttcataacggaaagaggatggtttgggattaatgagaaatatagggtgctagccatcagatattccatattttggttgcgtttggccaggttgtgcatctgttcggacttcgggatgtgcttgtaggaatccacctagagtcgcatacggtgtaggcactcagtagtaccgtaccatacgtctcaatgaagagaaagtgtgttttagaatgaggtggcagtgaagagctttggtagaatgtaataattcaggaaaacgaacgagttctataaggccaacccggatcagaaaaggatgctgttcatgtcacggatagttagccagatggaaatcaaatgattcgggcatggcaatttcaactatcagtcgggcctgtcaaacttcatgcattccagctaactaaatcaatccatcgcacaaatgtcatcaatagtgtccacgctttgggcaagattcacgaggtcaggtgctcatctttcagcttacgtaattatcaggtgatctgggtgtttacctgattatgtaagactcagggcgtgctcaattttactcagaggagcaaaagcggcaaggaataagcactaaaacgcaaagggaaaggtgatgaccatgcagcaatgcttccccactgtccgagatgaggttgatcgtggggtgagatcatgtcttctgatactatcggttatagaagaaatattgtatatcgcacatcttttcctagagtagtagaataatgtatggcatgtgatagtgaaatcgtcataaaaggaaccaagtggctcaaagggcccgaagaaaatggctaccattggccctcgtgacgtttgttaggtcaccgccaaacttgacttgaatccggggaatctctacttttataactcgtttactggtttcgtttttattataatactttcattccggagctaacagatctccgcatttcacaccccggctgaatggcttgcttctctaatgcacaggcctaccatgtcggtgttgggcgaccccacattagttcagtgccatcatgggcgcaaacactcccaagaatactctttaccccaacccttacctccgcgaccgctctgcaaaacgatctccatcccaaccgtatcgtcgctcgtgaaggattcgtggaattgggccggtgatactctgcacacctaccgtgatggtctctcgaaggaacaacggaaacaaagggcggacatcgaggaccgcaagcaagtcctgtatctgaaaataaagaatgtatgtacatgcggtgtacctgggccgagcgatcgcatctgcagggtgacccctttctaacacttgggctgcaggctgtgtcgtacgaagaatggcgaagttgcgccagtgaactggacgaactagaggataacaacgcttggaagcagacactcgagtgcaccgaatatgatcctcgtttggtacaggatcgtttgcgacagttggaagaggctcgcatcagctgtgatgtaagccggatgttgttcttggtgcgtactgcgctgagtcgggacctggcgcatatgagcaatgcctctctctatcgccattcgcatattggtacaaaggacttgatcgataggtatatcaccacggctttggatactatcgctacgctggtggatctctcggtgcatgatcgctgtgatgggttggagctgaagtatatcctggaccagctcctggcagctcgacaggcatttggtcgcagtgctctccttttctccggtggtgccacttttggcatgacccatatcggggttctcaaggccctctatgaagcaaaaatgattccgcgaattatctcaggtgcctcggctggtagcattgtgtgcgcggtattttgcacgcgcacagacgaagagcttccggcgcttttggatacctatgtacatggggatttcgacgttttcaatgaaaagggccaagaggaaaatatcttgcagaagatgactcgttttttgaagtttggatcattttttgacatatctcacttggcgaagactatcagaaactggctgggggatatgacttttcaggaagcatataaccgcacccgcagaatcctaaatatctgtgtgtcaagtgccggcatgtatgagcttccacggctgttgaactatatttctgctcccaatgtgttgatctggtctgctgtgtaagttcctcctttttcacatcatcaacccatttctaacgtctttcaagcgcggtatcatgctctgttccttttgtctttaggccattcacgttgatggctaaagatccgttgacaggggaaccggtcccctggaatgatcttcacaagcagtatattgatggctcggtcgatggagatttacccatgacacgcttatcggagatgtttaacgtgaatcactttatagtctcccaagtgaacccccatgtggttccatttcttccaaaggaaacaggcccacaggatgcgacaaacgacggcccttcgttcattcctcgatggatgaacatgatggcgcaccttgccaaagacgaggttctgcatcggatgaacgtcctctcagaacttggagtctttccaacatcaatgaccaagtttgcctctattgtgaaccagaaatatcatggagacatcaacatatacccagaactcctttcctctaacctcccaaggctcctggagaatcccacaacggagttcatgctttcgtcatgcctgagtggcgagcgggcgacatggccgagactaagccgtatccgaaaccactgcgccattgagctggcactcgataatgcaattcaaaatatgcgggcccgggtggccttcagtccaagtcaggttgatctacgtatgccgcaccgtagtcgtcactcgattgactcggcagacagcaacggaaggggacgttatcgggacaggcgaagagggtcccacagccccgaatttgaaaagaggcagtcgggtgggcaggaactacgtcggccagatcacgaactgagaaaggaacgaagcactgtttcgttagagaacccgcctctctcgcaatcaagcgagtcaatcttcatgccaacccaaacaaggacccaccgccgtacatcctcagtattcttcagcaatggagggatgttcgatattgggtcaagcagcgatgacgagctcgaacgatcatacatgcttcgtcccaaactcgcaggccaccgaacattctcagagtcatcttcgtttggcagagtagctccgagtcacgggccccgcagccctgtccggtcccgacgatcatcattatcctctaacccggcctataatttctcctccacggctcgtcgcagttccccaaagcaggtttatacgccgtcggctcgcgatttctccgtgaccataccaccttcatcccgccatctgctcagtatgactccaacgccaacactccttccgagctcgcctgagcccctcacgcgcaagcggcagaattgaataatatacaagcaattgtgcagcttacttgatcctttcctttttcgggagtcacaggccgcatactccggattcttgacacgtacgaagtacaagctcgcccctcaaattccccgaatttcgtgtacgatctaggacactcggacaagaaggctttttgattcttgccgattgttataattccgtacacctaccgctaagcatccactacatctcttttcggtcatattccctctctttgtctatcgttgtctccgggttggtggcatctatagaaaggggtgttagtctatgcaacccgatattatcgtactagaccacctcttgcttatcccctttgcatatcgaatctgccggatttgtctgtttcctttctgtttgctatctacaacatatgacatgcatgcagcggttttttgtttttagcggggacaattttcacgtatacacactatggggcgttgaatcctcagatgaaacagtcgaaacctttaaggggctattcgtagctaattttaagttaataaagatatattattctccattcaagggttgatcgtgatacccttctccaccgtcggcgctaatggccctgaagctaagctatttcccagcacaaagtcccgggaacatgccgctgagtgagcttaatgctgtagccacaaaggaatgcttggcgttcttgaaaagccaattagaaagaagctagtggaggtcggaagcaaatcaatatcaggaaacaatcggcaaattcgcaatttgggtgatgggtcatgtagacacgcgtttcacatgttcatgcaatccatggatgtgcaatatacgtcgatatgccgatagattgaaacgaaacacaaaacaggtccatatttttccgtaatcctcatgttgcaagatgttgcaagtgttcaagggaaaagtggaagtgtccactaccaacgtccagtctatatcaatcacggggttccactgtggaccctttccccagggctgacgacgactcggccatcaactaatgttccaggccacctcgaggatcacgacctatggttctctactccgtatggttctcgatcttttgcagaaagaggcgatgctttctatattccggtggagtatatcctagctcaaccttagggagacttcttgagttgttctgagcgcctctcctgcggatccaaaatcagcctaaatgttctcaactcagaaatattggaacaaaggtgttccaccctgccgatcagtcgttaaccattggtccctatttatcaatcggtgactctgttcatgttttctagccaccttgagtccacccttgtccgtggacaaccagcgcatcctgctaagcaaagtctggcgaagtctatgcacatgaaacgagtgaccagccattctgttacggataaagtctaatgacgtcggaaaatagagggatgaggacatcatctctgacatgatgtgatacgacctcaaaaaaaggggtatcttgcaccaggcgtcctgaagtcgagttagagccctcggccgtaccacgttgcgaacctgttatgtacaacggatgtgagggaagcgattgatacggtcagaccatcctgacaatcatcgatttgcttttacgttattctgcacgcggaacatgatcgtcgcactaatgtttggtacctggctgtggcgtctgtagcccaactgtaccgtcgatactttccttgtcgaatgcctatgacaactttttaccttctcttacgcgttggctgaccagcaaacgatccagcgaaaatacctcaggcccaggccatgtgtagagctctgcccatccacgggtgctgtctacctggtccctgacaaccctagcgtcccccaagttaagatcgacaagcccacttctactccgtaccgctttaaggtatcatcgtccggccagtccaccttccggcctgtccagcctctgagaaagcaacaacactgaagtcatggcgcgatcacggaatccatttcggccttgcaacaagcttggtaaatcggcagacttataaacccgtcccagaccctccatagtttttttctccgaactataaaatctgtccttgatacaccacccatatatctgatttctgattcaagtttctccattctttactttgatatatcttccaattaatctataccaatcacaatgaagtacatcagcatcgctgctatgggcatgatgggctgcgccctcgcccttccccagggtccttctcctttcggcaccctgccccagggtgccccgcctttcgctggcgcccccagtgatgcgcccatccccagcgaaactgccaccggcactcctaccggcattccctctggcctgccctttgacaagcgccagttccattctggacccggtcatcaaggtcctccccccgacggacctgctcctagcggctccccaactccgactggtcctcctccctcgggcttctcgagtggtttccccactgacttccctgcacccaccggtctccccttcgacaagcgccagttacactcgggacccggccaacaagggcctccccacaacggacctgctcccagcagcttcctgacttccactggcactcttccctcgggcttcccaagcggcattcccagtggcttccccactgactttcccgctcccaccggctcccctcagtaaacactgagtagctgagcgaccaagtggcttctcgccatctattgctacactgaacctagtcttggacctctgatatgaattgatgtttgatgtcacacgcaagacagctttcgcgcctcgtgtttgttgtacagtggatgtgagggtctgatgtattgggagtagttgactcaattgcccagtactgtatacattatagggaatattggttatatcatgggaaagattggttgggatgcttttttctttcgttggattcgggtctgcgagacgatttattgtttatgaattgtacacaggctttttcgtcactttttggatttgaagatattgtcacttctctatcaatacacactcgtttgcgctacctaggtatcatgatgtatcagtgtcaaatcaaaactatagtggttagtcttttgatgtgacaaagtagttattaagtggccagatgattcaatcacagagctcattccctatcaaaaaacacgcttgtgcagatattccagccgccaaagttgacttatagtcatatattttactccatagagttggtaaaagataacagaatctgttacgcacagtcgtatagctcctcaacccggtatcagagacagtttaggcaaggtatctatagatacttcaagctcgctagcctatatatcccacctttctctactgaagcttgaaatgctttatactaggcctgtacttctgtgagacgagaggcaagtagaaatatagtagatatgtatcattgccatgtggttgagggaattgtctcattttgaatgttttgtttgacgtaggttggggctgctgttcgtttccggtcttgaagattgtttgtttacgtatttccttttttctcaatctctctgccttctatctgtcagtcttatgtatcttttggcttttccttgggcccaaggaaaagcagagaagagatttgtatccatctgtaaagcacacgtggggatggcgagagcctcaagtgactaggcacatatccatttaggaaactgtgaccccttgtagatgtctcaataaccttaagcaaagagtatctgcggccatctccattctctttgctttctagcggccgattctatgctgcattcacgatttcacattcgaggacaggaaggttatggtgtagggcaagcggaaatgtacctacaaagtgaaagtaatgatagccagtccactctgtctacaggaaagggacctgtgacctgcgatatctcaacaggatcattgggaatgtcagctcggccctagtcaagtctcaacagaggtaggtgtctcgagcagcctgggttgctataggttccaaaccgagtgctcttgcttgtgtattctagataaagatactaaaacaacaccattgcttcacagggatctaacatgtactgtatcgggtagtctatcgtattggaaccagaattcatgactgagtaccggttgtattgattccccgtttgtttgaaacccaaagatataaaagccctccaattgcttgttactgtctgtttttcttcttctcttcaaaacataaccttccggacttatcatccacactcaggactttgatccaactatccatcacttccatcacatctatctatcaacaaacaaacttgatcatggctccagtaaccgataccacgagcgaagccaatgagcctgcttcacccaaggccaagctcagaatcaagctcaatgtcaagcccccggccaaggctgagaccgaggtagaggcccccaaggccagtgacgaggagttcctcttaacccttctcgataccgtgaaggtcagttatctctcactcaatacctagctgctggactatatggtatactaatcaaagctcaccacaggtcaatcaccaggccgcagccaatatccttggcatcaacaaggcagcatgtcgcatgcgatttattcgcttgcaacagaaatacggcttcaagaagaagggccccaaaggtactccacgacgcaagaagggagctgccatggtcactcctgccaatgaggccgatgtcgccgaagggggagactaatggggaggaagccgaggactgagacgaggactgagatacccggtcgcattggccacaactgtggtgttcagaagaagcctggacgggcagatgaatgaaatgatttcctactctcacctcactgtcctatcaatctgacaatctatggtcagatctacgtaatctagtagcgccgtagtcgagtgatatcgtgatccaagagatggtgacacacatggaaaccctacagtagacccagatccctccaatgtcgcgagacacagtggaatgaagcaatatacacatgtattctgagctcatctaatcccattgtctagcattacgatcgtagatgcccgaaaggtcaggcttccggcagctagctaaatctagcctgctcattttgcttttaaaagtaactcttgtcttcatttctattattcacccttcacttatcaacttacttatctgaaagcttcacacttactctaactcctgatcctatgattctacacctcactatcctgccatgagaaccgtacccagcattacatgattcaagcccgagatctgtatgcgtatagaaattttgaggttggcgatgaacacggtgttcaaggccgattccaaaatttctttggggacgtacttaatacaatcttcgagttacaatcgaccatcacagcaaacatcaacctccgtttcgcagattttaaatgtatccagtctacataccccggcacacctgacttgatactgaaggacaacaatcacaccttaaaggtcgtgggggagctcaaggtactgtggattggcgagcatcagatgaagatgacacgaaggattgccaatgcgaggcttttgagagagatattggcccagcctatcatgtatatgaagcatctgggctgtatgtatggctttctaagcacatatgaagagacgatgttcttgcgacaagtcgtggacaataatggcgtatggaggattgagtattctcctgtgatcttgtcgtccaccacttacgagaaacgcatgatcacttcccctgtttctacgaagcaatattttttctattcaggtttgaatgcgttgaatcactatataaaatacacatttctctatattacctcgaccacactagagcgcgatctccttgccatcagagtacgcatattcaactatgcccatgcagctaccctgagccccagcctaaattgacatgtcggataaccttgtgctatcctcaaattgtatcttaattaacagtcgactatataagaccgaatagcgaacaaaagggagagactatgaagtgtagataggaacccgggatcaaagttgaaattaaactaattctttaatgctcgaggggattgtatgatgtgagtggatgggaattgcagatgtactggctatgagagaaagacgatagacgagaaaaaaaaaggaaataagttacagtcatacatatatatactagaatcttgaatcttgaatagtctgagctggggattgtcacagcaccataaaccgtactaaagagcatacaggaagattagccgtctattgaaagacatcgaactccccaaaggatcaggaggacctgtaggagaaaaaatattgttgccgactttctattctagtccagttaccgttttgacggaggtagtcaaatctaagttctaggtgaacaaggtggaggatttctatacgtttattttttcttatctttcctggggctcaataaaatgcttgtacacaatctcaaattctagccctagagtaggataggtatccggagaagtggaaagtttcatattaatgcgaatgtctataaatatccttaattaattagctgggttacattcaccctgcatgcatatcgtactttatgcaagcaaggaatatacattaaagctaattgacatctattttaagaccgaaagtggccgatatgcaaactaattaaggaacatttgaactgacatccctgtcaagcgcagactgcagatctctgtcagctctcagcgctaacgggcaagccctattggtcggtggtgtgaacagctacaatgaatgagatattcaatagctggcacaaggccctttttacatctcttagagtagccccgttctgagactaagctttatatcccgacgccttccgctgaaatgaagtcctctcactctcagtgtcagactggctcgatcaaagtccctggtggactccatttgctttgctttgcttttattttcagcttgcgtctttgcagggattctttggagacccctccattgcccctcaagacccttgttcgtcgtcacctggctaccagccaatccacggcctttcccacttgtttgtttctgtattatcgcagaaggatacttgcattgaaagccatagaagtctcactgctctgccgacttgcaaatttgtcagctggtccttgtcaccggttgcttgttggttcttgttataacgcattaatatcaaccctgtcctatatttcccctctattattactctcctccccccgttagacgaatgtcatcttttgcttctgctggggggcgataccagagcagtgcgagtcgataccacacaaatctctcacagagatcatggcaggaatcgttaacggacctctttctctcttccgcaagtcggactcttcaaaacctctccatgctcgttggggggacgtgtctatctctgtacccacagatggctcatggaatcaatacgaaaatccccatcgacccgtcaaagagaaatcagcatacggaccaggctacgtgcccgactgctctctgcaagaccggaattcccgcccagtgaaagaggacgatccagaagatgatgccagaagcgtctgcagtgcagcttcaacagcttcgcgacggagttcactatccttaggaggcctgcgaccgggccggctctctgtacgcctcgcttcgcgtcctagacaactacggggcaaatcacaaatggaaagagacgcccaacactccgaggaaaaacgaaatgagtttgcatatcgacccattcaacaagactacaactccgaagtggtcgaaaagaccactcagcccagcaatcgcttcaagtatattccgaccaacggacggtatattcaaagcccaggcattgaggctacacgcaacgcccactcgcggcgcggctcgtcatccgatttgattgatcaccgatacagcggtcgcgatcgtgatcaatacactccggccgtccgagtgagcaactaccacgaggacgaccgtcgcagtctgtattctaacattggtgataattcggatagtcctagttcgcagcggaactatggactgccgtctagaccacggatgtcaccttcttttgcggctgatagcaggagagcttcaatcttgaagcctatgacgttagctatggtacctgatcccgataatctctatgagtaataggtctatgcggatttcgcttgcgtttggtgttcattgaccatcactacactgggtgttttagtcgttacagtttactggcctttcaatcttcgcgaaatgaaaccattcatcttctttttcgttatatttgcatttaaataacagtagctttggtggaaattattgaaaagtggatattacttcatttgtgatgtattcaaccttggattacggctcaatctcaatttcagcgctcttgtgacgtgcaactcaagtacttcttgatagcattccaattggcggattcttgctcccactttatcttgaaattcacattctaatcagggcagctgccagatatttgaacctctgtggcgatgtctttgaatatctcatcatgacgccatatcaacgtagttgccccggccaatagaaaatgccacgaaggagcgatccaaaacactttaattgtcgaatacattaaacaccaacaatagagaactcactatctcaataccatcttgatcaaaatggcagacgcagtagtccaacttcggtgtggtgtcaaggcaagtatattttgctaacatatctattctcgattctgatctaacccggtttaatagaacgatgactgggggaagaaaggaaaagagtcgatggtagctcagctatggtcgaaaacccccaaaaatggaccaattgacgactccaagcactattcagaagtaagcttttcggaattattgaaccaagcacagtcatgttgaccttcgagcagatgtggatgggcacgtatccttcaaacccatcccacttactttccacgggcgaacaccttggggactatctgaagaagcaccctgagctagtgggcaagtccgtccacgaccgatggggtgccgagattccatttctgccaaaggcaagcgcaaaatacaagaattatagtgtgtggccatgtagataactaacttggatctagattctatctttcagcaaagcgctacccttacaaatccatccagaccagaaactcgctacacaattgcacaaagaagatcctaagaagtatggcgatccaatgcacaagccggagattgcaatcgcactctcaaaattcgagctcttcgccggctggaaacccctgaaagacattcaatcgctgttcgagttgaaccacctggcaaagtacatgcccaaatccggacaattcaacgacgaggacctacgccaagtatgcaaggctttactcagcgcaccagccaaagaaatcgcacagacaatgaaagatctacaagccatcccggaatcccagttcggcgcacacacctacatccccagcctccttggtcgtctggcaaagcaatacggcgaaggcgacaacggaaatctggtcgccgccctgctgatgaactacatgaccctaggaccgggagattccgtcttcgtcccgcaagacagcatccacgcctacctcgagggtgatattgtggagtgcatggcgcggtcggataacgtcatcaacacgggtttctgcccggccgcagaacgcgacagcgtcgagttgttcgggcaggctctcagctttgtaccgcatagttcagaggattcgctgttgccgcgtaaaaagagcgacaagggcttgaatggtaagacggatgtctatgcaccgcccatcagcgaattctcggtgctgtgtactactctcggcgctggggaaagcgagacgcacaaggctattctggggccgagtctaatgattgttacgaagggttgtggtcagatgaaattccccgagaataaaaccgctgagttgaaggagggatatgttttctttgtggggcagggtgttgcgctggactttgtgaccgacaagggcatggctgttttccgggcgtatgcggagtaaagaggctccggggattttcggcgatagagggagaggaggggtgtggcagcaggaaaaggtataaactgtgtgatatttaaaaaagtgaacacttgcattttgccaatcggggcttggaagattgaagtaaggcttgcgttgtctcagattgtatgcaggcgccgaagccctaactgtgagggtttccaaatccggtaggagactcatcaaatcaaaagggccagccactcacactaatcaacacctttcataatcccgagccaataagcgatgattcctttttctgaatacttgatctatgtactctgtacactagtatctaatattgaattgcacggaggttcatttgctgatcgcgaggcgctttggacgaaccagtcaacgtacaacagcattgtcggcatcggcctcaactggaacccggtgatggcacatgtatcgacctgatttgtgctgcagcaggttaaatttagaaattagggcgcatttacaaaggcctagcccgacggattaggccgattatgcaggataatggaactaatgccggctaattttgtcaaagttttgattctatctatagctaattgatactatctttattttccccgcgaatcgctcaaaatatctttgaaacagggaccgtgtgtcagggacagactaagcttcgttgatgcgtttcagggtattaaatatctatatcctcgcagtttcaaagtatggattgttctagcatcaattgaggctcaactccaaaggcttactggtctgaatacaatatcgtggtggtcaaagctgcttgacttcagttctttgcttactttggatatctataccctggatgttttcgtggcaaacacacccccgttgaagtatcctttgcatactgggctatgtcaatcaattcctctcttgacccccgctccgataacaaccactattctcgctcccccgtcattatcattggtgcaatagctggcagcctcatcttcctagcaagtatgcagcccgagccgcaaccctccgaaagcaaactaacctaaaccagtggctggaagcttactatatctcttctcacgaaaagaacgggccagaagaagaaacgtccaacaatccgaggatctctcccctctcgaaccgccaccagcctataaaacggacgaactaggcacacccagaggtctccactccctaccccggcccttgtcttcctttgcaccggactacagtcgccaggcccagcatgtgcaagcgtaccaacagcagctctctcgcacttcatacgatcaacccccggcataccccacactgccaacatatgatccgtcacgataccagcctattcggccaacatccatggtgggcgatattaacgcccacacctatacctataaccccaccaatcatgccaatccacatcccggcccctcttcccgcttgagtgcagttcactacagtgacgccagactagcaacatcccggccagtttcaatggccgaccaagggcctccaattgggcccgtagctgttccaaccaggtcgaggcatcagccagctataccatctccaccggagcagaacgtcagacaggaacgcaaggataggagggaaaggagtgcatctgagccaatgatgttggcccaggccccaaaacaacctaaaccagttctgtcgcggctgatcaccaatttccgttgaggttatggattgtgatagtggcttgggcttggttttcttgtttttacgactatcacgacatgacgctttctgtttttgattatttggatttattcggccttggaaattgtgtttacaaatcaaatatattaaccggtgagaggctctaagtgttctccgtacagagtagaagacacctggtctgtgctataatctccgtccgatatcgatcaccccgagtttttccccttttcacatgcccttggcgcctacatctatcccaactggctccaacgcctcgatcatccctgagattctggtctctaattaattcttctctcagaacctgcgcaatctttgaggtactttgtgtactgtctactcgactatgcatattaatccttcaactccacttcgttgcagggattcaaatgcgtcacagtgaaacagtgctttttcgctttgagagagggggctaccccctcttttgatccctgtccttcacctggtgtttttatttctcattggcaatgactggtcaagaagaagccacttcaatatgtccatcacgccagttgttggaccaagacacctggattcaggatataaatctgccattccagatatctaaccccaactccgattatccatcgatggtctttgtccttgtgagtgcagatccctagacaagcgccatgccaagacgacgaacgacgagcgtgcgttgatacagacacactatatgcaacctatggccgacccgcgtcaaatccgtcaacgcatgttgactgcgccgcacctgtcaactgactatctattttgctgagaatggccgggggggaacagggatcgcaattacccctcccacatgcattgtctacgcacactgcagctataggagcctctctttacggccgcctgcttagatcctccagtcggccaagtgttcgccctgcaggttcgctcttttttcttattattatttttcgaagcgctgttgtttttgcgcattgcctctattctcagattctgctccgggggccaaccagaccaccgggttctctcccgggtctctaatcactcgttgggtcagttagctaccaacgccatccccgtcaagcacttcaccaagaagatcttcgctcttcttggtccgttggatatgcagtggttggctagtgcgcctccatggacgttttgttttgatataacttcaacgcacacgggcaatctatttgctctagtcaccttctctccatctctctttattcctcagccgtgctcgacttgtcgccctggggagagaacccatgctctctgtggggagtttgataagttctgaaatgaacaccgtactggggagtgatttgtcctcccttcggtaaattttaaccttgaacgcgtcacccttccagtccccatgaaagattggttgaaggctatggctactttcatgaagaagttcaaaaggaagcgcagagtgtccacagagctccactctcgctggggtgatgtttctatcacctatcccacgcaagggtcctggaatcagtgggatcaatcttctggtttcgtcgcgaatgcaatagcgagcaccaatatacagcccgaagcaaatcaacaatatccatccgccggcccattacgccagccgagttctagcgcctcgagcagacgatcgcgaagcacgggtatccgagaacaccaagtgggagacgctccatcctttccgactggatatttcgaccaaaacatacggcgtcgcgttggagatagagatacaaatacaccaccaggtccaggactcggccttcgtgatctgaggcgtgggccaaatcgccgaccctcaagctctattgacaatgacgaatgcactacggatgagtcatgcgaagaagaggaagaaagggaagagcgagatactccgggcccacggattgaattaagccctcgggaatacggcacgggagacgtctcacacagaacacgcgacgatcccgaagatttcgataccccagccaggtctcctccgctctctgtgacttcgcgcatgcgccgttgcagcctccaaagctgtgccacagagcctacaacgtctgtatctggtggcaacaactcgagacgaacaagctttacagctgcatcctctatctctgctccctctatgccaccctgcacgcctcaggttgcgtacaacgccctaaagcaacctcccttcccggagaaaagataccctccccgtacaaaacatcgggaacccgagtctgcgcctccacaggaaatggtgccgtcctatgatgagctctatggttgatatgaccccaaccaactacgtgcaactagaagtctatatgtggtggtattttattttatttgtttgtcggtgtcccagaccaaattggtcttgttcgaaagttctgtagtcgcccgtcggactcgatttgccttgattttgttcaatagttttgcatcatggtggtttatttgcaatttcaattatctcatataattatctgagcacaatattaaggaaattcacatctgtacgtctatcgtttgtccttccctaagtacgttgtactgggatctattacttcaaaatccggagtcctgtcttcccccggccctagcaagaggggtgttgcttggcatatcaaaactccaataatttcccgtcgctttcacactcgagggatgccgatagccgtttccaataggcctcgactggaatttgcgactttccttagatgagggggtgaacatgcgcccgtccgtgcatcatgcagacggtatcacagtcacaattgcttctcaccaatcaagcgtcagagttcatcacactctgtgcacctgcagctatccactaagagcaggaggactggtcgatcactccatcccaccaactgctcctcgattttccagccaaggtgcagtcaccaaccagcctataggcggcgttctctaagcgctgaggaccaacaccgggagtaggaagatgtgcttgattcgacgggcccatccttcccgttgcctcgcccgagaattagctgctctgcatgtgcttgatggtgcagcacttccctgtcatcctggccgtcatatccacacggaacggatcaagagctgattgcagtgaaagaaagaagctttcccaccccgagtaaagtcccacagtcccgagttacaatttaccgtctctcatgccaacgtgagatctctctatccggcactctgcccactctctcccacttggcggtcgctgtaacagaaaccgtcggactctgtttcactccggctcatcatgatcgggttaagtggcgacagttcactttcctctaaaatgctggcttttgtcctggctataattttggtgaatagcccagctctagtggttttcgggttgaaaactacaccgggttcgccctgcactgatgtgtgtggtacaacgaccaacactacatcatccgagattgcgtgtttggatcaatcatacaaccagacatcagtagggaaaagtttcaaaaactgcatctcttgccagttggacagcgagttcaacgatgcggagaccggagaatcagacgtgaactggggactctgtatgttgtaccaccttccggagatcgcagactgcggttcatcgctcaggtctaaccgatcgaacagataacctgcgatatgctttctcgacgtgtgtgtttggatctccagactcgatctcgaatgtttcgtcaccgtgcccagtcgcatgcgatggcgtgcgtttggcagttgaaacagacgttaaatccccagacacatcgaatctggactcgtggtgtgaaagcccgtcgtttgcagataatgtagtcaacacctgcgagttctgctacaacttgacaaccacccaagtttacatggcaaactgtatgtatgccctgaaacccattcctatatcatatgatatcagcaaatcccaagcccaaaggttcaaaaaagcactactaagcatcatccaccaaacccagtcctcgagtccatccgctacaactgccatttcaagacagtaacgggcaagaccttcgacatagccccaacgagaatcttcagccaatcgctcctcccctcaagtctctctctcacaacgcccactgcaaaatcctcaaacctgaatctgggagtggtgatcgccgtgccaatcatagcattcttaattatcgtctcatccctcgcgatatgttgctttttcttcatccggcaccgacgcaagaaggcccgtcggaaccgcaactcacctcatctgtacaaccactggaacgatgggtcgccgatcagcgcgcaacagcaccagcaggcctgggctgagcaacagatgtataattccggcgggtatggccacggttcaggctttgcatttgttgataatgatggccgcggacaggagcttgcctatggccctggccaggaccaacattatcaaagccagcagtatcagcagcacttccaaggtcaggacaagtcaaccttcacgcaggatattatcgaagagcctgcaccacaggaataccagcagcagcgtgctcaggttcctgctcgctctcaggtctttgacccggatcagaagggccagcatgttcaggatcctgttcatccgcaggtcttggacccggatcgaaaggactctcagcagtggcagtgattgttgtggcacctagtacctagttgtgctgtatagcatcgttgtaatgtctgtggatggcacagtcagttgaaggcttggaattaatgagatcaggatatcagctcccctattgttgatagcgtttgggtttcttgttttacggagttgttctgctttaggatcgcgtcgatatatccctgacatcttgcaatgtcatatctttggcgtatatagtttggtcaatagccaatgaagaaaaaagtgcccagcaaggctttcccgtcaagtacaataatgtactcaaagtaaaaaaggaagggagactgcaaaggagcagcatccaatgtcaccaggaagggcggcaaaccgacttatgtattgactgccagcccctctaccacctacatgtacacacataacaatccgaaaatagcatcaacaagccacagcaaagcaatgccaacgggacaagcggagcctacacaagccagactgtcagaaaatacgagaagaccggccatataacctttgagcgacagccttttgtgttccagcgccgctgcagattggccggccgttctgcaggcgtttcagcacgcaccgccaagggtccaggggtccaatggggatgggatggtcgaccctgatgttatttttggatctgtgagctgtgtggtgattttggggattgattattgggcgttggaggtattggatggcttgttgcttggtccttggtccttggggagatgggttttcaacttaggcgctgccacttgtccacctatgttgtaggtacattttttgatatagaatgaataaattgaaggattgcaattctacgagaacgtagtcatcgaagaaaagccgaagaaaactggggtaagacaagttgcgcccgttgatctacacttttatcttatcccaactctttaaccacccaaagctctcaactggccatgtccaacctcacccaagaacaaattaaagtcctcgagcaatcgcggcagcgtctcgtgcagctcactcgctcactcggctcgctgatcgcaagtctaaatcaaagcgaccctcttccgccgtggtaagagcgctaccatcccaccaaccccatccccagacctcagccaaatacaacgactatccagaaacaaactaaccccaaactaggacctccctccaatcccaagcaagcatcatctccaacaacctcattagcgtctccgaccaactctccgaccaacgcgacctcctctccaacctagtcgcctacccaggcccagagtacccgggccgaacacaagcaaacacgctcgagcaactcctccgcacaaaactcgatccccgcgtcgaagactgggttgcgcgcggccgtgcagccggtacagagtccaccgcagggccgtctaatttcagctccgattccgatgccgcgcataaaccgctgagcgatgcgcagctcgcggagctgtgggaatgggcgccgctggaggcgaaccaggaagcgcggcggaggaactggggtgggaattttacacttgaggagcgcgaggctgggattgagaatgttgttactgggttgaggaggcaattgcaggacgatgatggggaggaggagagtgaggatgaggacggggatggggatggggaggagatggatgttgttggcgttcatcggaagcctggtgctgctgagttcgagttcaatattgctactcaccatccgcatcctgttcagccgttcgtgccgctggatcttattttgagatatatgactactggacggatgccatagtctccgatctccaggcacttgactcagggcaagtagtctgtgtttacggctgtacttggtctacgatttcccatgaatagaacttctcgtagcatgttcttctaaatgcatgattccaaaaacggacggcaatattattcttttgaaaaaagcaaaggtaagcaacagccaagctatctaaccccgtcggcgagtagtgggtgtcttgacggtaggtctcggggacgctcccgtgctctgggccgatgatgccttctcagctacctttgcgcgaggagcggccttctgcttgggcgtcggtgcattccagtaccagagcatctggattgcgaggatcacattgagagagaagccaccaatgaaaccgtagaggataaacttgtcgtcgacttcctggagggtcgtgaagattcgggacatggatccgatgaggtagttgaacacctgattaaagaaataattagtgtttggactgggatcaggttgaaaggaaagagaatcgtactgtgaatgcactgagctgtccggttcctccctcgcgccagatggtgtagatttgaggcgccttgctagcaacacctagagcacccgcaccagcctgcaggtatgacatagtatgcgcatccaccagggtctggtcgaacaacagcgcataaatgctggcagctacgacagcaatgaaagccgcagcagcggcagagcgtccggcatagttcaagaccagaataccgatagcaatatcctggacggcgatgagagcagtctcgccataggtgctgaatgggaactggttgcgcacgccgtacgagagagtgatgagcaagctggcagtttcgagggcgtaagatacgaatgagacaccggccgatgagcgggagctgatcagcttcagaatctgtgggattttgacgactgcactggcaccgacgatggcaatgccgagggccttggagatggcgagtgatgtgcaggcagggtctttagtgagatcgagatcgaccaatagtgcaccgtggcaagactttccaatcaaggacacgacggcatcatgcactggttcagggatggctgagacaataggcgccaaataaggctgaagaggcgtaatcagggagttctgaaggatatccattttgacgagaataaacaccagaaaggaagaacaacagtattggaggtcaggcaatgtccagaagaacaatttgttgacattccgaagtcaacggatgtggcccgtgcacaaccggggaaattcaacttctttcgttctcttttcttccttctgcatgaccgacccgccatgatccccctgcggccatcccttctacgaaggcctcgagaggcgctattgtgctcgcaatgcctctttgggcctcgttctgtgcgccccgaggccaatcgggggttcctatcgtcctcgaaacggcggaccgggactgcggatgatcagtccccctcggtattccacaaatcatacttctcggccaatcgattctacgacgggtcaaatatcaaaggcggcctgctttcttcacttgcatcctccaatgcgaaaagcaaatcaaccacttcttcggctcccagcggtccgactgtcagtcaggtcaattcgtctgcaacagcatcgtccgctgcgattgcgacagaagcaacaccagaggaactaccacatcggcggcgaaagcgcttgaaggatgaaagcaacgcaaccggaaaaccagaacccagccttccgctggatgcctcggcgcaattgtcgaacttctcatccacactccccattacctccatccgccgcaagttggctgcgtatctcgccctgacgaaaccgcgactgtccttcttgatcgtcctcaccaccacctctgcatacgggatgtacccaatctcgtccctgcttaccctcgacccggctatgaccccactccccacactttcgacctcgaccctgacttttatatacctgacggtgggcactttcctgtcctgctgtagcgccaatacactcaatatgatgttcgaaccgaaatacgacgcactcatgtcccgaacgcgcaatcgtcctatcgttcgcggccttgtctcgcaccggggagctctgctcttcgccattggcaccgccgtcacgggcctttcactcctttatattgggactaacccgacaaccaccgccctatccgccaccaatattttcttatatgcctttgtatacacaccattgaagcgaatccacgtaatcaatacctgggttggcgcagtagttggtggtatcccgccgctcatgggatgggtcgctgcagcaggtcagacggcgacgattggccatgacacatggcgtgacatgcttttcagcgaacagagtatcgggggatggctgctaggtgcaatcttgttcgcctggcaattcccccacttcaacgccttgtcccatctgatccgcgatgagtataaagcagccggctacaggatgctatgctgggtgaaccccgcacgcaatgcacgagttgctctgcgctattctattctgatgttccccatctccattggtctttggtgggtcaatgtcgttgggagtggtttccttgtcggcagcactttcgccaatggctggctagtccgcgaggcatatcgcttttatcaacatcagggtgcgaacggtactgcacgtggcctcttctgggccagtatctggcaactgcctattctcttagtcggcggcctagttaccaagaagggtctgtgggatggcgtttggaggaatctattcgggcaatccgaagaggacgatgatgaatatctgtactatgaggatgaataagagtttgaaggcgagaaggctaagcaccatcccctgagctatcaaccgggagtactttgtccactgaatgagctttgaaccataagtctctcgtgctggatatcttccagcttcattcatctcacagagctaactccccttatctattcgaaccacatttttgttctgggattttgtcttatacggcggtttggagtggcgtttctttttcttgactttgtataacacccgtcctatatggaattcatacagatattttcattcttgtccttttcattctttttctgcactttgatcaaataccataatatacaagctacttcccttggacacgaacttccccgtctacacatccctatgtctgcagaaccctcatgtcagcagtaaggctttggacagcatggtggacgacaattgcagtctgcgaccattctccaaacaaggtcttaatattagggtattgtctgggagcctgtttgacgagcttggccatggtggggcggccagctgcatccatcgcttgacaggcaggtttgtcatcgatacagctagcaaaaccaatgtgtgacacgcttgagttaaattatatcgaccaaactttgagagtttcagcaccaaagcgggaaccttagccattcggccataaatagtatgagatatctaaaaaaggctacacggcgaatacgcatatcaggaggttggtgaactctttgtataatccggttgatgccgagaggagagctatgtattcaatgtcctagaatgccaatgaaacctcgggtatagtatagtacatcagtatagtacaaaatggattgtccacgaggacattgtgatatacaatggccagtaacgacggccaacatctacttcctcaacttcaagtgatacgtcttcagtgcttcctcggtcatgggactcggcgctccaaccatggcatcgtcgccccccttgccagtcttcgggaaagcgatcacatcacggacggattccttgccgagcataacagcaacaagtctgtcaaagcccagcgcaagaccggcatgtggcggacagccagatcggagggcatcgagcagatgtgagaagtctgtcaaccgctcagctggcatttttaggatgtcacggaagatgaattcttgcactgctgcgtcgtgaatacgccgactaccaccgcctagctcgacaccgttcacgacgaggtcgtagtggtcagccactgcctgggtcgggtctgtgaggaggaggtcaacgtcggcgggggtcttgggtgcggtaaaggggtggtgtgtggacgagaagcctgctgcgccgccctgaccgggctctgagtctgaagagggagagaagagggggaagtcgacgacccagaggaagtcgaatccggtcggggccggcttgaagcctactgagaccgaggcagcgtgcagtgcacggcgtagatcgccgatgggggttgagcccccggagaaaggcgcacgggggcgtgcctgcagaacgatcaggtcaccgtgatcagggtccaacaattcctcgacttgctcggcggcttcaaatccgaagggctgtagtccacagagcggctgcttgccattgtagacgaagacgcctgggccgccgtctgggttattgttgaacggcgcacctgcaggggagtcgaggaactgggtaatgaacttgtgagtttcagcgggattgttgtcatttccttccaccttgaaagcctccacgatgggattggccaggtcagaaatcttgccgactagatctacggggagaacatgatcaagtcgaatgatttccatcccgtatctcgtgtccggcttatcagagccatatttcgccatgacttcctggtaggggactttgcggaatgggccctccggtgcagggtctttcatcaacgacgaccaaagtcggcgaataaccccttccacggtgcgcatgacatcgtcacctgtcgcgaaagacatctccatatcaagctgtagatattcaatcagcatacatcaccatcaaccaaccaaccatgtagtaatccatacctgagtaaactcgggctgacgatcggcacgcaaatcctcatcccggaagcagcgcgcaaactgataatacctcggcaagccactagccatgagaatctgcttatactgctgcgggctctgaggcaaagcataagccagcccttccctccgtgtaggcacaatgaactcccgagcgccttccggcgtagacttgaacaacagcggggtttcaatctccacaaacggcgggcactgctcctccagctcctttttgcaaatattatgcgcgcgggcgcggaagcgcagtgcttcacgcagctctgcatctgagcgcagctggaggtatcgttgctcaggtgggaaaaccgtttcaggcgtcataattaagtctttaggaaagtcgttgaggggatggatttcttccaatgcgagctcccataggtcttgcattggtgggttctctgtctctgacggcttggtctttttcttttgaactatcccgcgcacagccacggggctattcacgttcacggtcttgagcttctcgaacgcatcgttcttggcgaatgctacaacttgtaggctatgttgcagggtgggatcggataagcgcacgaaggatagtttcttggacagatctgctcgatttccgaggtagccatgtagtactacttctgtgtttggctcggcctgtgcgaagaacgtttcgaagtcgtgggtagcaggagggaagtccactgagaggcatcatgtgttagccacggtcctcccagactatggagaaaccaagcttttcagcacaagacaaccacataccagaccgcttgtaagcctctaaaaattcaggaagccgtttagaaggctcttcctgtcgcaaataagcccgagcatggaactgccggggcgcctgaacagggctataacattgtctaggcgaaatggctgatcgaccccgcaggagattcgagatctcgatgtagctggatctcaaccgcaaattgcggagctgcacggcagcaattggcatatttcaattatattgaatgcaattgcagccaaatcggaagaaagcaagacatgcatgtccggacaacctgatcattaaagccggcagaaagccactccgccctagaagcggactagcgcccgcaggaataaaaagcgcgggattttcacttgttcgtttttcttttcttcttcatccttccaagttttatacttgtgagtattgctgttcccagccctttcaatgggcattattgatcgttatactgactgtttgacagaatgatgaaagcctagtgtgttatatatgagacagtctctgccctctgagacgtgcggctctctctcttcggggagcttaagggctgtacgaatcgagggtagggtatgtgatatatgcgttcggcataccaaccttgtttacacaacggacgcgatgaaggcatctctgatccatttacaagacttgaaggtgtaaccatgggctttaggccatggtttgagggttcctcttgaagcagggagagatggatgttggacaatgttggtgacagctcgttcatatccgatgtcctctctctcggctcttagattcgcatctagctagctatacctcatcctcccctatgtatgggctcttctcaacagtaggattataccagggtcaattgtatcagaggcacaagtgcctccgtcatggttgaactctccttaaatccacttataagaagagattggatgtttgaacaaatatcacggacttcaatattcagtacttcccgcatgtaactatgtcttgtgtttgacatagtacgactaacatagccatcgttataacgatctagctcttcgtcaaggttaaattttgaatcgcaacgacatattttgatatgctgctttctcccagcaagtaatctatagaaaacaaaccactcctaaatacagtcccctcatcgaatatttcagaacaccctttcacgcaaagatcattttctctaacacctccttctccccactattgtcaacgagattcttaaacacgccaccctcaatccccataagatctctgggcgtgccaaactcggccgctttcccagcatccataacaagaatgcgatcaaagtctgcaatggtgctaagccggtgtgcaataaccagcagcgtggtggcattgcggccgaattccgcacggatagacgtctgtatcaacgcatcggtctccatatcaacagccgaggtggcctcatctagaaccataatcttaggccgcgagacgatggcacgggcgagacagagcagctggcgctgaccctgggagaggttgagaccaccctcagagattgttgcagagagagaggtgaaagcgttagagttggttttctggaccgtcgctggtgtcgtggtgcccgtttcgctggcctggcggggtgtggcagtccgcgatgtgagggtgagctcgtcgtcgtcggcctcagatatgaggtgcacgcgtgctagcgcatcgtagagttccgtatcgctgtattcatcgaacggatctagatttgatcgcaccgtgccggagaatagcactgggtcttgtgggatgattgcaagtcggctacggagatcgtgcagtttgatcttggagacatcaagtccgtcgatgaaaatctgacccgagcgtgcctctaggaatcggaagagtgcaagcgtcaacgaggacttgccagcccctgtacgtccaacgacacctacccgctggttcttctccactgagaagctgagcccgtttaataccgggggaagatccggtgcgtagcccaccacaagatcgtggacctcaagatggccctctgtgggccaagccgcaggtgcatcggcacctccttggttctcgatctcgatgttggaatactcgataacacgctctatggcgttcatattcaattcaatgttagcgtattgcctcaatgccatcgtgattgcagcgttatactgcagggcaaagctgagagcaaaacccgcaagtgaagcgctcacacccggcagatagaccacgagcccagcagtgacagttgagaagatagcaccgatgatgctcatgcggaatgcgagccagcggttgaacagccacaagttccaccatgcttgcgcatggcgattgatcttgttgaacatgatttcgatgtaggtgtctggcttgctgaaggcacgaatggtgatcaggccagcgagactagacccaaactgctcaaacacggggcttttcgcagtgctctcaagacgtttgacttgacgggcaccttccaaataggatacggccaatttcagacagatgagcaacaggactatgccgagcaagatcaccatccagtcgacaagcatccccgcaatcattattgcgaaaacatctagtagcttacccacgaagaacccgatgtcgtatccgattcgtgaatcgattgagtgaaagtcggctgtgaagcggttgagaattcgccccaatgggacagtgtctagccaccggagtggcgcgcggaggatagcataaatcaagccattgaaaaggttcctcgaggcccgcaccgaagccgaaagaatgcagtaataacggactgtccctattatacaggcagtgatcgagatagcagcatatactcctaggtacatatagaggtcgtcatgttgtgggaccggtgcagtttctcgcatagtatgctgcaataggacactgtattgctcagggtgtgctttagtattggaggatgaacttgtccaaacattgatccaccaagactgtgataaataagaatcagataaaggacaacgacaaggggactgtcataggacttcatgcacttacccgtccaaccatgagggacgaaaacattaagtagaccgagagcgtcaccaaccaatagaccacagagccacctttattcaagaaagaaatgtaaactgctagccgcacagaaccggtttctcgtttttcatcttcaacaaatttcttcggtttcgtctgtgtagtagcaattccatttccgttggaagctgagccatttgtggctatgttcggtttttgatgggatgtattagagatcaccttttggagagttgtctcctcatcgttaaagaattcacggtcttctccatctgcaacaagatccgcttgttctgtggcatgttccttaccaaggatatcctctaaatgatgtgattccttcaggtcatcaatggtacctgcatatttgatacgaccattctccaacagtacggagtagtccgtgcgaggaaggcatagtgcaacatggtgagtaaccaaaatgcgagttcgattttgaccgagcttgccggtgagagcttgctcaaagacatgacgacctgtgtgggcatcgagagcgctgaagatgtcatccatgataagtatgccagccctagagtataatgcgcgggcgaaggaaatacgccagcgttgaccaccacttagattcacaccattcgcaccaatatcagtcatatcgccgtctggcaacatctcaaaatctttttccagagcacaagcaaagatgacctcttggtatcgctctgcatcgtctgggagtccaaagagaacgtttgctttgattgtagcattctcgatccatggcgtctgagcaacataggcaatggccgagtcgataatccaatttgcctttgtcgcaaggtggtcaaatcggtctttaatgggaggtggaacgggtacctttatcgttcctgcgaggacatcacattcacccatgatcgacgagaggagcaggctctttccagagccagttctgcccgataccacgcttagactcttcgttgggaatttcaaggtcatgtcacgcagaacgaaacgatcctctaaatcttggatatcttctgcctccgcaggccatgcagcagagacgtcctcgaaagcgatataatcagcagggacagtattgacgacattttcgggcgtagccagaaatttgtcgatacgttccgagctgaccttcgcctccagacccatcgacatcagctccgggataacagcgagggccacctcgagagaattgaagactgccatagccgtgaaagccacagaaggtgacaaagtaccattgataatggcgtatgtagtcaacgaaacagcggataatccgacgggaccgagaacccagatcgcaagcaggccaatatcagcaagaaaagaagcccacaatgcaccaagttcggtttctcgcgtatcccggacacgctcctgccattgttcctccagagctgagaatttgatttggcggattccctgcagcacttcggtaacgatcgccagcttctggtcacgggatttcatcaatcggtcctgggcattcgaatattttctagctgcgtatacattcaatggtgtgacaagaagagagaccgaaagaccggcaaaggcactgcgccagccgaggatttggaccagaaaggcggcaccgatcatgattctgaagatcgcctgtgggataatgtagttgagagaggcaaagtcggaaactcgccgagaatccacggccacatggttgataatactctggcggctcttctttaacacatgatcgtcatcgtcgtcgacttcggctgatcctttgctggaattatcggaattatctggcttggacttctttgtatgcttcacatccttccgtcgcatggctttggcaaatataactgctgacagctctgcgtagatcggaaccccaagtctagaatagaccacccagataagccacgcctccacgctcgaggcaacgaacaacaacccacccagggccaggacccagatatacgatgctccgacattccaatccggggtatcgcgcagttcgagtgtcttcaagatttgaaaaagggcgacctgtggtccaaagctcagaaagcaaatcgtcagactaagcgtagtttggacgagcagtgatctccaatgcgcagcgacaatcgctacccacaatttccggttctgtctggcagtttcgaatttctcacagagaaaagcagcacggttcgatgctgtaagcctggggatatcgtccaaatccatagtcttgtgcttcactgcgtagtttagcaagccattggcccagctgaaagtgaagcggctgagtagcgagaccgaaagctcccgctcaaccagcttatcttcatagtaaatatcaggacgacgcggtagtagaacacatggtacggcgcgaagagcagcgcaagcaatttgagccaattgcaacccgacccaaagtcgcccatgcggaaggccaagtcgggagaatatcaagatgcccagttcaatgcccggaaccgcaatggtaatgatactgccccagaaagcaaagtggccgagaacatatcggcttgtcggtcggggctcggcgaagaaagcaacagcttgaatagcgagcagaatctagaaagaataagaattagctattaagcttggcttaaatcgaacggttgtcggggtttctacatacccacactccaaactgcagccataccaatggcgtggaattggtaatggcgagcttcaatgtcgcaagcacagccgatgcgagggtgaccagaaatccggcgatggagaacagggcaatggcaatccgttgccatttatcagagaattctcggagggattcctcggtcgcttcgccatcttcatcgcggtagacgtctttggctagttggatgggctcataatcgcgcgatttgcgtgcaatgcggtgggcaatactccgaatggctggtatgctatccagagcaactagggacaatgctagataggtagatgtcgccaagtaggccatatttttcagagacaaaaaacgaaagacaagagagaaaggcagacaaaagaaatatcatggcgttatcagcccccgactatagcgaatacgcttgcgcatgctagcgcaagctatagtgacatcgagcgggggaaatagaccgatctcagaccgccagtgactcaaaggcctcgcattcataataaatattaactgacagatttcgctctcgggctgtgtattgagtcacacgcatgcactatatcctgcagatctcgtgttcaagagtcactgtttggctgcacatcccctgtagaactcccgggctccgagattggaggtattgcgcggcatgtgccgaatagtatatcctgtactctctacggagtaagcactaagcagttagagcaattgctcactttcgcctcttccaatcccagcgaaatccatacgtccccacttgtatagcttgtacccattctccgtctaatgcaggaccggcctccacccgcgtctcggcacaaactcatccacggcctcgtcatccaagacgtcgcgccccaatcgcgccgtaataatactccgctcagcctccggtccgtgcacgtaaaacggctcgaagccttgtccgacgggtttagggatccacgttcttttcctgcctctttccttcgacccctcacttggatttcttatgatcggctcaaatccagaagcttcccggtctaaactgaggtaccaccgccgttggtggatcgagccgatcgtgttgttggaccctgggtaggcgttgtttctttggatttcaatgtcggcggtgtgggtatcgtctggacgtgcatgcctagccgggccggtctgagactcgggttgagatcgttgcggtgttggatccccacttgattcttgctgaccaggtggcggcgaaggcgatccagagtccgaggtcgacggcgcttgtggtaccgttggcctggatgggtgtcgacgacgccgtttggggccttcgcggatcggcctcgcgaaatcggttgttttatccatccgcagaataatagtgtagtcctttggtaaacgggttccatgaagtcggagtcggattttgcgcttggtgtttcagtgttagaggagtctattcagtgtctccatggtacagggatatacctacattctgaaaagcttctcgcaacttggcactatctgagatctgctcttccggtgcaacgtgactatcttcggagttctctgatcgagaatcatcggtctccgggccagattggtccatttgataaggtagaatttcatattctccagtatcccagataataagactccccgttttgtaggaagccgtttcaatgagatgattctgtgaagatgtaagtattgctattataccatctcagatcatcaacccacccatagacaatggattcgagtttcagttgcattccggtttaatcgctggctattcggatccccaggcatcccatacataaccgaccaactcacagagctagtctctgagaactggaggcgaagatcgtaatgcggccctgcgatgggatggtcatgttgatgaatgacgaaatgacgtccttctgggtgctcgtttcgtctatacagctcgatccattctttgatgggcagccgtggtaatgactgttttggaggtgggcgaacgtattctttgagctttgcggaaatcgtgctcagatggtcgatcacttcaacctggcctgcttcgatggcagcgaggctgggtgaagtgtttagttgtgatacgttcggcgggatggagtctcttccatctccatccttgacacatttgatggatgatctcttttttggcggagagacaggcgtattaaggctcatgagaattggacgctcgtcatttagcggaatttcttgtctcagctcatggtctgggctagtttctgggctgcaagcgcgtttcatgattagagcaccggagccgagggacgtcgtagccggtatcaagcgagagttagagccgtgacatgcatcgaagcagtggtattgtttgattcgactacaacctgcatgactttttatagatggaaacttgagttgatctcctgcggccacaaatggcttagtaacaagcttgacttccaaatttggaagctttcggtcaacgacgtcagaggtatgagactcgatgtatacgaagctacatattaatatcgtgagattacaggtggtgagagcgaattccgagacagaaaagttctagccaattgaataagtcaccaatcaattatatatctacgactgataccttttttatcttcagaatcatatctaacttttcataaagaatgttcaaattcatttcaatttaagactacatgcccgcgaaatacaaaaaaagcaatactggcaaggctagagttattgcagtgcctgtcaataaaacatatgaaactggagcccaatttctccccaagcagccctaattgtgagaattgagaatgggattaacagccacgctctgtgggttatggaagacatccttcggatcaatgagagtcttgatactctgaagccgtccaagattggatccccagtaggccatctggccattctcgaggtagggatcgacatatcccggataggaacgcagaggaccgggtggtcgattttgtatcaccacttgatgcaagcgatcgaggaacctcctggcaatgaatgcaggaggctcaaagccgacaacagcataggattgcatccacatgacagcatcacggtgaacataggccgtggcattcatgggaacatcgttggttgcgccaccttctaggtcgaaaataacccaccagttttgactgcccttcggtgcggtgtcgagatatgtaaacaaggcgactagggcgtgctcggtgaatagttcgtcaactgtgaacgatactgacttggagtagaacgacgtaagtaacgctccgccgatcgagacaagataattctcagccgcgtgggctaccaaggctagccaattcgtaatatatgccacattgccattgttttggattggaagattgttttccagctcaaattcatggaactcttctctagttccgaagaagctgcccgtgatcacaatcccgccctggaagattgtgagctcggtggaataattccgcgtaatattaggctttgccacgacggattgccaagctttgaagagtttgactttgtcaagaacatccccttggctgaatgtatacgtgtattgcacagcgcccttaggaatttcctgagtgcgaactttgaactcagtgacgatgccaaagctggctgccgcacccttgatagcccagaagatgtcctggttctgcgtttccgatactgtcacaatgctggaattggccaggactacttcagcctccagaacatgatccagcgcagttccccattgtcgcgacatgagaccgaggccaccaatggtgaaatgaccaccaacgccgacctgtggacaagatccgtgtgacattgctctaccacctgcatgcaaaaggcggtcttggagatcacccaaatttgtgcctgccccaatcgtggcgatatgagtgtccgggtccattgagaatttctggaagtctttcaggtcgacgacgacatgaccatcggctcctccaagacctaccatagtacggttggtttagcaagggtaggtttggatcaagaatatacttccataccgtaattgccatagctgtgacctccactgtaagcttgcacctgatagtttcctttgacagcacagcgcacaatttcagcgacctgggtcgtattcttcggataggtgatcacctcagggtgaacaggaatggccaagttataggatggcagggcccggaattcatatagaagatctccccgaaaggttgccatattggggtttcctcccacagcggccatgaagcactcacggccgacgacgctggatgtgttccccattctgaacgagaacggaaattgagggttgttccaatatggtcaagttgaatgatgtatctggaagaaaaaaacaacatatggaaggagctccataatgaccaatggaacatatagaaggggctggattgcgactgctttacgagaggtctgctgctcactccgacgtctcattttcggtgccacagttgttacatatgtcacgattgtcacattcattgataatactcaggaggtctcctgattctttgaagacattcgtctagagattgttactccagtcgtcttgtcatgctactgtgtgtaggggctggtgtcacacggcgaattagtatacgaaagcgcttgaggtgatgatatcgagggtaaatgttcgaataggatggtcaaccaatgagctcataatggcctacgtgaataccgagagatgccgaaagaaaatgctcggggaccactataactataacggcgacgtgggtggtccccgatccggaaatcccttttgacatggaagaatatggaaagcttatcttgactcctttgttcctttgctttttttttaaaaaacactgaatttgagaagatccccggttacagatctttccccccctgcattccttgggcgttcctatactgcagctatcataaaaattcccgtcaaaccccagattacacttcccgcaatgacatcaggaaaaaaatctggataacaaagacgaatccgcagagcatcaacatcatgttcaccccaattcataccacgctgggcgcactgttactattccacggctcgtcaggcctgctcatacacaacggcgccgtcttcggcatctcctctctcttatccgggtgcgccttcagcccgagtcgtgacaatgtgcccatcatcgcgggtttggtatccagtattgtgccggtgtacttgctggcaccatcactgatcccgaactatcccgcgtcgccacactcctgggcttctgctgcagcaacgttgggagtgggcttcctattggggtggggaacaaaggtgaggagtatcggacataattgcaaaaccaggaacaagttgactaagtgaagcagaacggtcaaggctgtacctccggacacatgctgtgtggcctttcgcgtctctcgccccgctcattgattgcaaccgccatatttttcacaactgcattgctcacggcgaacattgtcaagggcagatccaacatcccgtcctgtggtacgaccccgtgctatgctccagtgtatccatctgagtcggagttaggcttcatggctggtgcagtgctgctggcgggtataacaaactttatcgttgtcccccggaaagcccgccggtcggaggaatctagggtcatctattcctatgtgacagggttggaatttggtctgggtcttttcatatctggaatggcggacccagcaaaggtgctcaggttctttgccttcttgactgacccatcccgatttgatccgtcgctagcgctggtcattctatttggaattggaccatccctgattattttcctgattcagaaaccaggccaagcggtcgaaaagggaaagcctgttgcaaagcctacccttgctgagaaatggcgactcccgacggccacggtgagtgacatagattggcggtttgttataggtgctgcgacgtttggactagcctggggactggaaggtgtatgcccaggccccgcaatcttgcggacaatcctgcaaccaacttggggtttgatcaccatgggtggatacatgctgggcaacctcatttaaagggaatgggatatagagattatagaaaattaattatccattagctttgtcgaactttggcgtgttctcgggggaataaagtcgtaatcggtgcataacggtgcaagaaaagaaagtatggaagtccggagatctcaggagctgcatcagaggtttgattagcaaaggaaataataccataagatatgtacaaattcggttcaagtgagaatagatgccattgatctgtgaataaatgcattgggtatataacagagggaaaagactagacagggaaccgaaaacacagaggggtgagtaaacggaagaatggcttacaactcagtctttctgtccatgcgaagcgcttccaacttggccgattcgtcgtcactgcgcggactaggggccgatggatggccaaagtacccttccaactccatccactcagcaacgaagccagtaactagcatgctccagtcctcgacggtatccaaatctaaatgctcaccgtcatcgtcgattgtatgccaaacaggagggaatcccttgaagggggcatagtcgataagatggaggatctcaactccctttgcgaggaaaggaatgtgatcatcctggatgccacccataggtgagagcgtgtgcccatccttctcggtatcgacgaaccacggatcagccgagacagacttgaactgcttcaatgtcttgaaccgcttttcaaggtcgcccaagctttgataggcccagtgagtggtctcataccaagattgaattgtcggggatttcgagcccagcagatccaaaaggacaaaaagagatatagatgacagaggacccttgaattccgacatcgcgggatagacttggtcatcccaatgtgtagccaaggcacgagctccgtagagagaatcggtagaagtccattcttgaaaggcttcttcgccatctaagaatataacctgaaggccccgctcctcttcgaggtagttatatagtccctgctccttcaacgcggaccatttcttctccagcgcggcttcaatgctgcgcatggcatgcataatcatcgcacatggcgcagcactgtcgatccccccgatgaagcctttcggttctattttgctgtcataatgggcgacaagagtgagccggccaacgtcaccaaccgaggcccaaggaggatcgcgagtagcgatgaagtttcggaagggcacctccttcccctttgatagtggcgttttagctgtagagttctggatctcaatagtccatttgggcaatgtggttcgaaaaaagtcggcgaagtgattgagcaccgcggtggagccgggggtgccagggacgcgggtccttagtataggtgagagcagagcgccattgtgaatatcgaagtcgttgttggggcgtaggagctcggtcagcgtcttatccgatattttctcgtatgcttccacacacgctagaagcatgacaaaaagccctagccaaagtgacacattgccaggcgggatgcgataagccggagacatggcgttgaaggaaagctcgcgctaactgctcatgacctgcatcaaagcaatgatcggataaatctcaagcctagtccagccagataatcaacaatatcataaggtatgagatcaaaggagaatgtgtcaaagacctggcaggggtcagctcatctagcaatccagacggagcggaagctaaggcggtcacctttttgccggccccaatttattgggagatcgatcaatgtcaatgtctaaattccaagccaactacaacacatagacacaatgcgacttcaaattttacttcaccctcaattacgcacaactctaccagagtgtgcccagcgcagtcttcggaggaacgtctgggttcggttcaagtcacagatccctcggccatcgcagaagcatctttcgccattacccaagtcgaaggaaaccgtcccagctacgcgttctccagtaacaaggacgctcacaccgccaaagacaaccaccaggacaggtaccgtgaaccctcccggccagttgttagacgtgcgtgtgctgagctatagttacaggaccacctgaacgtatcttagtgtactacggaggaacgggtagagctatctttctggggacgctacgaatcaccacggtactcctatttggtgcagcgtgtctactcgttgcaccagcatgctccgtggctgacgattacccctggtatagcacacctgcgggtaagctaattgaacatccacatcgcctgagcgtctatgctgattttacctcagtgattgccgctggtgccctcccgatgatatttgtctcctatactgcggcgccatatgtaaatttcatccatctggcgttgccggcctttgcgaggaagtcccgtgaagctgccgtccagtatgcaaaagacctgcctccgacggccgtgctgtatctcaccagcatgcgattcaacaccattcctcggcaaacagctgttcgaataggagacctcgttccatttaaagagaccttgcggcccgtcacattccagaatctgaatccgtcgccgcaacgatggtggcagggcagagctccgacccagttctatactggaactcacagcaaacccgggagacaaacatcggctttctacccagaattgtggaatggaatctacgagcaaattcagaaagccaagtcgcagcctcgttgatcgaatatatacccgccacttgatggctgccgatattaatggtcagatgcccatttctctcagttggttgatcgacggagctaagtttcagtcactctaatcgaagacgtttggttggatatcaattgacaattagacacgccagacttatttcacgacatccatttaccctaaggttttggatctttgtcatatagaaactatccatatgaagtctcagtcacgcgttaacgaaagaagtcatttgcccttctttaggggaaaattcgtccgttcatatagtgtcgatatgcctcaaccctcatctagctctcatcttaagcaactctgaaccaaaggttctcaaagcaaacatattgcctcttccagtagctcgtgattgaacgtccggacgttaaatatccgtcatttccaactcggctgatgttctctttcttcatccacctccgcgttaacggtttcacttaacgttttcaagcacgattcacatctatcaaatcttggttttccctattcacgtcgacgcggtttctccttctcttcctcaccacctccactcgcccatacaacttccttcttccgttgtacacccgttacttcaagttcaaatccgtctcgacgctcgaccttgactaccaaacttacatacaatctaacccggctaattcaagatgtcttccccggctgccccgaaggagaagctcttcaccggtatttccgccactgagaccaagctcctggtcttggccaatgtctgcctgaagaatgacaaggtatgccattaatcctaggttcgctcattggaatgtgcttgctaatacagtggaccacaaagatcgactacgagaagcttgctttgaacgctggcatcaaggcgtcttctgctcagacgctctttcgcaatgccaagcgcaagctagacaagatgtacggcaatagcaatgctgatgccaatgccaacggtgccacggccgacctgtcgcccgaggagactccctccaagcgaggaaagtccaccgcgaaggcgcctcgtactccaaaggttcttttgtcccccaaggcgaccaagacttcaaagactgtgaagtcccccaaggcgaccaaggcgaccaagacctccaagggtgacaaggccgctaccaagaccgaggagagtgcagaccaggtttccgccaagcccgagcttagtcctaccactgcaaagtccgctgctgatgtcgctggaggtactttccacggggccaccgtcactgagcctgccactgagccatccgcatctgccgccaccactgagcagaccgagcaagatgaggaggcaagcgacaagatcgacaacaacgacaaggccgcgcgtgatctggtagtgaaccagcaccttcctgagtctctacttgccaaagaagatgatacctacgaggaggaggcgcaggaggatgaacagcaccaggattaattctatgctcagcaactccgaaagcacaaggtatcagatttgcgaagcgttttttctaccagattgctaggaggtggttcggaggagtatgtgatgagggaactgtgaatgctctttaaagaaaaacaaaaaaaaagtgtctattggggtttagtctcaaggcagtgataaagcattcaaataaaacacaatgaatattgtatttgctattctagctacgtatacgtatgccatattcatacatgccaataaccggggattttatttgtggcgcctgcagtcaactggcgacccagagcccaacccataaatgtctcttctttcagggagcagctatcggttctttataaacagttgattgattctagagtaactaagatcatgccagattggtgtatatcaaagttcgctagaaggatatggtatctagcagttcaatctgtacatgtccatttttatatttcccatctccagtccgggaaactcgatatcaaattggatgaagaggtcactcgagaagctcatcccttcagtttattttattacttcgatgaatgcaatgtctcttccgaagtgggatccctcagtcttgcgaccctatttatatactgacttctcaggtcaccttgagagtttatcttcaatgatcacttgctttttacacaaagcttgcctttacaatcgtttcaacttctattactgtcccacgtcacatagtcatcatgtctttcacccaaaagcaagagaagacctccaacctggtgaaagccctaggcctcacccaaggctagatggaacatttcctaatgggatatctgtgcatgcaaaagcccaaggtatgtgagaaagtgtgttactccgtgagtacttaagcttaagaatcttcatgacagattgatcggaagaagctcggggcgcttagcaaggttacgccttcctccgtcagaactgtccacactaagggccggcgcaccctcgagaaatgggaggagacggtgatatccggggctacgaagaaagccgaggaacatgaacgaatcgatgaggataaccctgatgaggctgtggaggctgcacatgtcgaggataccgagaattaggaaggaatgaatagccaactttgcaacagtcagctagtcttgaggttccagggagctgacatgtgttgttcaagatgaatccaacttatacataattcgaaatccataattgaaataagtacaaaagtccgttataatataggctgtgaccttcgagtctaatatcacaaattcccgatttccacaaataaagtacaagtaagcgttgcttcttcatcctcttcactacacaacagatcgttttccatagcatcaatatctcacaacaacctatcttcagtgcctttgcagagcacaataaatccctatctcatcaagcagacaaagagcccatacatatgtcacccactgagaaaatgtcgaccacgccatcccccaaaaagaagtccggggactggggtaatctcacagccggtgaaatgaagctggttatggccagtgttctatgcacgtctggaaaagtatgcacgctcttaatactgccttcagtcatgactcaaactgactgttcctgtaatttagcttgacaccgacaagctcggaaagctgaccagcatgaagagaaactcggcagcgagtcgatttccatccgccaaacgcaagctggcgaagatgtttgaggatcagttggaccttataggcaatgagaatgactccaatgtgaaggaaaaagcgccagctagagtcaaaaagcgccgtgacaaagttgttgaatcacccgaacctgaacccgaacccgaacttgagatcaagatcgagactgaatccggagagggcatgagcaccgacagccccgtgaaggctgaagctgaatcagagaatagcaaggttgaggccgatgctgatatcaaaatcaagcccgagcctattgactgagtcatgaaacgtgcctatgtctgagacgcagtctctctcaagggtcttgattggggtcttgagaagggtgttctcacataaatttgcctaggatctgtgatttgatttgaccaaaattacccggcagaaggcgtcttaaatgcatctagtttgtcctgtcccatgagaatggctgtggcatatgtttgcctggcaatgagaactcattgcacaataatacgatatggctaccggtaatgtgttcagacatggtgtgacattctagataatggatttgaagtaaaaacatactttgctatgggatagatattcacattcacgggaaacaagataaccgaagaggtccagtgacgccctctgaaccaacataaaaaacgacaaacgacacgaacggccagttaaagtgaaagatagacacaaatatcatagacccaaattatgaatatggacgcaataaagaacgaagcaccaccgaataagtatctcaatcactaaagcgcctcgattgccttcatcaagacatccaagccgcgatcagagacatcgcctgcatttgagtcttcctctgtgacagactcgcgcagtgcccaggccacatcactccaccagcccagacccacgaagccaccacccttacggcgctccaggctctctttgagccggctagtgtgttcccactgcttggcagcagtctccgcacgttcaataattttgctcggaatcccacacatagatgcacagtgcataccgaaactgccttctgcgacaccattctcaagcttgtacaggaaagccacacggcgctcgacatcgtcgacatgaatggccatacgcttgggtgcaatttcgggatgattttcgaactcggcagcaagcgagtggtagtgggtggcaaagaagcccaaagctccaatatgggtagcgatgtgatgaagtacggcctgagccacggcaacaccgtcataagagctagttccgcggccaagttcatcaagaatgacgagtgagcgcggagtagcctcggagagaatcttctttgtttcggacaactcaacaaagaatgttgactgggcagcgaagatgttgtcgttcgcaccaagtcgagacatgattcgatcgactggggtcagtcgggctgactggcagggaaggtagcaaccgatctgggccataatgacagcaacacaggtctatacttgttagcaacatcattaaaataaagggagaaccgaggtggacacaccattcggagaacagtagactttccggcagcattagcaccggtcagcaagtcaatgctagcatgtttgccgccgagctggatgtcgttgggaataaagtcctcaacagaggaaagaagacaagggtgacggagctcttcaaactcgaggacacttcgttcgtcgtccacaaacactggtcggcaactaggatgaccgatggccccggaagccttagctaaactgatgaggcaatcgagctgcgatacaattctaacagcagccagccatgtgctgtaatgctcatcgaaccgggcatggaaccgcccagcgacctccttgacgatttgactgtgggtttcttgggcctcttgcaatttgcgaatgaggcttcggagctcgggaaagtagtatcgcttgacctgcttggtcgcagacatctggttccaattcttgggaatattcttcactttgatgggaacttcgagttggtaaatttccttgccgttatcccggtagcatatagcagaggaccccaaatctcggcgagcttgcttcagcatggcgtcgaggtcccggtggagttgctcaatgatctcctgggagttatcgaagtcttcttcgacaccagactccggaacaagaatcccattctcttttgcctttggacgatcgaatgcggtcttccagtatcccagcagagaggcaagatcgggcatcgctgttgtcaattgaccgataatgctttcgcctgagcccgtgtcactttccttaaggagacccatgatgtaatcgatttgttcgaatccttctaggacacgtacaaagtcttgagccttgcagttgccagcgtggatacgggagatcagtcgttcgagatccggcatctttgttaattgggaggagaactgatcccgggtactgggatcggagttgagtgaatcaactgcatctaatcttgcgttgattttctttgaatcaatcaatgggtggcatacccattgcttgaacatgcgtttgccgaagggcgtaatgcatcggttgagcaactggaagagagtgccctcagacccgccatcgaaggaattggcgaagatctccatgttgatcagggtctggccgtctagtacaagacttgtagccttcttgatgggatcgtaccacgtgaagttgccaatggtgatcaagtctcgctcaatcttcagcattcgcagatattgaaccagagcaccgaatgcagacatcagtaattccttctcgcgagcttgacgcagggtctcgggccaggcagtgagattatcgtcgtccacagagacgaaatactcgcttgcctcaagctcccgaacagtgatatcagattcccagaactccttaccaggtttcatgaaattccagatagtggtgggtccagtgttatttttcagaatgcgcatggccttttgtgaaacgcaagatttctccagtagcaactcccgagggcgggtctgcgcgacaaaggtttcgaacttggtcatgtcaacatcgtccacaaactcagacaagaagaattgaccggtagcagtatcgacaaacgcgataccgaacgcgggatgctcgtccacaatggcctccttaatcgcaacacagtatgtggacatatcatcttgaagcatggaaccctcgaccagtgtacccgcagtaagaacacaggcaagctcgcgtttgatgatcttgtcttctttggtgggcttcttgccctctctctctcgcatttctttacccagcgcggattcagattggtccacacgggcaatcttgaagcccttggccacgaattggttcgcccagtgatctaaactcatctcgggaacaccaaccatgcgcatgttcactctgtccgtgagcttgagatcaaaaagttggtgaccaatagtggcatcgttctcatagagttcatagaacttgcccttcttgaagaaaacgacagtatcccagaatttctgcttgatctcccagtattgtttctcgaaaggggaaaatctagaccatgcgagcggagggatatagacagttcgcgggtcgtagtcagggtggcccttagggttgccgtcgatgtccttgagattagcaagccatgaatagcgctgctcaggctccttgatgtgggccttttcctttttcgcgctagatgctgtcttggtagacgctacagcagctcgttctttccgaggttctgtattctccggatcaaacgcccatcgcatcgcggttccagctgaaccttctccctctgggacatcaaggtcgaggtcatcatcgggtggaggaggagcagggacggaggaagatttagaggtaggcttccgtgccgattgtgtggatggtcttttcctcttgtttgaagatgtaaccgtctcttcatcagaatcatctgcaacgatgaaatcgtccaattctatatcctagtcagtcgtgtaccagcaaacccaaccagcaaaagaataccataccatcatccgagtatcctccatctcctgcctcgttgaactcatcttcgctttccggctcggttcgtcttctcttggtcgcacggccggagacgcggtccttgcgtttaggacggaagatgacctcgtcgtcatcctcgccctcagagtcagactccttgtagctgacctgctttttcccctagacagatgggttaacaagatacatcaattgagcaatcagatgccacacgtacccgacgcgaaggtgacatagtggactcctgttgtgcctctttggtcgtctaggaagggaaaagttcggtcagattaaaggaataaacaagcagcagagtccgaatcaatatacctttaaagaactaccattttcctgttcgtcctctgggactggaaggtcgctgcttgggacgggactcagatcctgcgcaaagcttgagaagcttcgcttttgttccttcggtgtgggcttgacagcgccctcactccgcttctcggaagctctctgcgcgggggaagatgccggttctcgcgttcgactattcgagggggtcgctggtgaggacttttggaagaaaccaagaattgacttctgggttcgcatgttctgggtgctgggagttgtgcgcttgagcgcgggggatggcgacgcagcggacggagatgaggccgatggtttggccatacttttcttatgagatcaaagcaattgagatcaaatgaaaatacactctcaactcaacatagtaatcaggggagttgtgagggaattggggacgggtggagataaggcgcggatcgcgtcgacgcgtaaagcacttcgagactcgacctatccattgatcgacacccgtgaccttgtcttttctccacctgttatgagcacttgcgaagtcttatttgtctttatgaagatggcttgataatatttatactattgtacagattgaatattgtagcattacagatttagtggagattcgccttagtccgacttggtcggctcagtcggctcaatctactcagattcagtctcccatccaggagccgtgagaccttgcgcacgatattcttcatcgggcacaatgtgaacagccttgagcttccacttgcccaactttaacattagaaggttgccgttcaagacaaactcctttgttttctctgcgtcccacggccggataggtgtgaaggataattggtctgacatggggccactatcaccaggacggctgccgactttggcgccattgttgacgatgactcggtggccctcgctcttggatgaaacaaggccggctgaccatagaattttattgaacggctggttgaaaaccagcgattcgggcagtgtgaccttgaaatctcccatgttggcccaatttgtttggggggcatatggatttccggactgaggagtcgagaagccagcggtgggggattgcggatgaccagattgaggagaggatgacttgggaagaggagtgggctctgcggttgaggatcggggacggaatagctggcgatgttggagagccacggcatcagcttcgaccttaccatggataagctcgacaaactcatgcgcgagcttgtgctgcgcaacgcgctgagatgggtccttgttctgctcctccatgatggtagcgatttcaggcaagggtacgaaagtgaacatcttgagatattgctcgacaacatcgtcaggcgtgcgcacaaagtactggtaaagttcgaatgtagaagtcaggtccttatcgagccaaacggcgtttccagcagacttgccgagcttctcgccggacggggttgtcagaagcggcgtagtgaaaccgatcgggcgatctaattctgattctaatggattgcggagttgttcgtcggcagtgtttcggctgatagacttgacagcctccataccgaacagaatatttccatattggtcggcacctccgacttggatttgagtgccctgttggaacagcgtccaccaatcccatgcctggagaataggataggaaaactcagcaaatgacatgccatctccttggttcaatcgcgtcttgacactagtagaaaagttcagtaaacccgcgtcaacagcactgtcggacctgccaaaactcacgtatctctgccgagcatgggaccaagtcgcatgaaagcgccaaggtctcgcaacacttcaaggaagggcatcgagttccaccaagtgttgttatttgtcaacgcccgcttccacattgggttcttctcgtgtccgtgtctcctgccgtagtgctcaatgctcgagcccaacttcttcaactgcatatgcatgctagccatgtttgctttccggattgaggaatggacagcatctcggcctttgaggcgcccgctggggtcgccgactctagaagtagcaccgccgagctatggagtattaggttggtgcattcaatttggcgtgaagtaggcaacttactagaaatgtcacaggtaatccccagacatatccccaggccagaaccatgaaaggaagcatgtgtccaacgtgcattgagggggcagtcgggtcgactccaacatatattccaacccgcttctctgtgaagaccttgtgcaacaagtcccgttcactgtaatcgaaaggaaacgattagcgagccattcaaaacctttccggcagcaaatgccagcaacttcattatatcctagtgtgcacatacccgacaacatcatggatcaatcctcgctcttccaagtgttgcgcgaagttcttcctcttcccggctttgatctcctccgcgaagccggcccattcctgctccccgtctttcatacgctggatatacttttgtgtaatccatctctgctgttgaaagcatgtcccggactgcaaggtggacaatactggccgattgctgtcaccgcgcggcagaatcgctgttgttgcggcaaaactgcgcgctccgcacgggatccgacggggtgtgagaaggctgcggtatggcgctgggccgagcgatgccgactgtagtcgcattggaccggtgtgagaatgaggatattaataaaacggctcacaatggactcgagtctgcacacgatcaacacctccagggccagctccagatgtccgagattctttcgatacgtgcggaacattaatgatgcggcccttatctctgatatgttgattgatttcctaatttgggctatatttagggcttagggccagagaagtacatggactgggattcagatccgtgattgtagagaaagatgccatgttggaataatactctctccatctagcaaacaaaatggtaaagtctttaaagacgactggcttcaagtgctacgtcaactcacaaaaacctgcacgaatgcctcgttactccatccactgtccaatttcatcgatttccatgccgccaatatatcgattgccaggacattagcattctctccaccttgtttccataccgtattctgtggaactggtcgtcccaaaatcatgaccatgaagtttcgtgcaatgctcctgtcttgaagatccgagaaatagatccccagagtgcccagcgcttttaagctgatgtcaactcgtaaacgaccattctcaacaacagatatatctgaagtcactatagccgctacaccagtcatctttcccaaaagaccgagcacagccacgtgtgtcagacggtcaccagaagagttgccgtcatggctgcccgtcagcatgaacgactgagtcgggtaagcagtgaggatctcccagccctttggccccagaacaactgataccagagattcccggctcaacggccgcatgcgatgcgatatcctaccgctgctgtgtgcacgcacaatatactggccttcggagtcctcgtgaattcctgggaaatccatcaatgggactatgatcgaggcctcggcagattgaatattgaaaacgcctaagattccacttccagtcttggtccagccggtatagcttccaacgcgcagaacacgtccttcgtcgtagtcgttgtatatgtctatcgtgcgtccaatgacactaggacgcaagatcaccgtgattcctttgacagtaggtgcagttatctgattgagtagggccaggtcatgtttacccggctcatcggtgatataaattggccctccggatacacatcgagctgcagcgtggaatgacgcgtataggtgacttgtttggaacatatcccaatccggcaatacgttcaaatatcgggtgagtaatgcattatgagcattacaaaacacatgccatgggtgagaggcaacaacatctggaaagaagtcgtcggagtttcgcaatggaatagtgggcttgttggtgggcatttgtgaatggaagattatttgaggggtcattgacccgcatgagattgaccgagtgctcaagtgcttaagtgatgcgatagaccatgcatcttgataagaagtcaagaatcttcggcggtccgctgggtcatcaaggaggtcaaggaagaattgtgcatctgtcttgaccgagtctataccaacagacgtaaggtagtcatagaactcatcgtagaatcggttgatatcatcgggatcaatggcaacgattgtgccatctagagggctctccgtgaatgacccattggcagctgcgtctttgatcttcacttgctttgttttgaatttttgggctagatccccatctggtgagatacctccccaataacccagcaaggcatgccagaccgcgatatggtcgatatcgggatgtgatcgacgaatagctcccacagtatgcttcaatccttccggaaatcctttcgggtgtgcttcgaactgcttccagccttgcttgaactgagactgcccttcattgtcggttgtctgccagccatcatcgataataagattgacgatgttgatcccattcgccttcaacgagtctaaggcatgcaagatcttctcttcggtgaggtcctgtccaagcccattccaggtacaatatgtgagaccgtcgaaccactcagaaagccactgtgcactcgggtctttctcaacaatgaccatatcatcaccagggggagatagtgggaccgaatcgtccaaatccagattactcgtatcagcaaatggcctgacgactttccgtgcctcataaaccactgcagacatggcaacttcaaagttttccgctgcgctaacaagcacatggaattcagatgcttctaaatcgtcactttttgcggagatcacgacttcaccgttcccacctgactgaaacacggtcaaaacatcgttgactccagaaacggccagtagaacaagattcacgccatcatcacgcaggaaagagcaaaatatcgcatcttcagtaagtcgaaatttatctttgccatgtctagggccaagccatgcgctccccacacgtactagtgagaagtacctcaccaccgacgaagcggtcccaagtgcaagttgtttgatggttgaagatccatttcgaacagcatctgtatctccagaaagagcccagaggatcgatccaggagcttcactgggtcgagactcaatccgcaagtcaccatgaagattatcgatgtacttttctagttgctctttgggagctcgtgcagcgacaccagtggacacagcgttgtcaagatcagagtagcgtgcactatatagaatttcaccgtcgcccaccgggtgtctttgattagcccactgccattctgtgtctgggctggttcggaaccggactgtgaactgtgcatgacctcctggggctggtaggattatctcttctgagaatacatagcgatgatagttgtactcttcatcgtttccggacaaaagatcagcatgatctgtgttacatctttgcaatggcagatgttcccattcggggccagtgatgttatgccagatctgtgcttcccatgattgttcggggaatgagccgctggactcgatagtgaccgtgaaacgtagctgttgacaattttagtattcctttgcattacaccctcaatcatttcagaaagtctggcaatatcagatatgaccatatttgggggactcaccgcatcttcttccaatcgcgatgccttcttcgccgtttggagacaagtgatttgtcccagcggaggataggatgtgacacgtgcaaacatggccatttgagccggataaacaaatgatgcttgtagctgtcgtgcactttggctagggccctggattgggagggttgaggtatctctattaatgacctccattgaagaaaggtaggttgttggatgaggtatctcgcccaggaggcggaaataagtattaaaaaaagattatttacgaaatgtctcacaagagactatagaaaacttgtatgcttgagtgtaacagaggaaaagaagcaggtggttggttttaactcctgcaggggacggaagtggcggggaagctaccactgtccaaccagaatgagcctcacctcatctcggacatcaacatactattttcgaattactaccagtttttaagttgactgccttcttgaaaactgcaaagacactaggatagttctaagtattgtatgttctccactaataaaaacttcattgtttatttgagatttataaacaggatgaatgaacataaaaaaaaggtaaatgagagaacgacaagagtcgaaccggaacagtccaggtagtggaagatcttaggcacttccctcgtagtacacgcaaagcatgttaccactgggccacccgctgttgagtcatcagtagtagcttccttttccttgtctctcgcactttccaacattagaaagttgtcacaacggatgccagcaagacttatgttatattaacgctgctccctagcctcttttcattccacttcttagttgatcttgatagtcaactttccaaagtgcttctgggtccactgaatttcgatctgttagcattcaatccctccttcctaattaaaaacaacttaccatatgatcataggcttcccgtgtctggtcaagggtgaacaccttgtcatccatcaaagggtggatatcattagcctcgatggctcggaccatatccctcatgagagctttgctaccaacataaacaccacgcacagtgcagatgtgagtcaaggcctccaaaacaaccggctgcttcttcgggtctacgcctgaaaggaacccaatgacactaatgacaccgtcgtacttaatacacttgaagctctcatgaagcgttccgctgccacccacttcgacaatctggtccacgccagctccgtcgggggtcagcttgcgagcagcatcgccccagttaggctcagtcttataattgatgacatgatcagccccaagcttcttgagcctctcggccttctggggagaagaggttgtcgcgatgactgtcgcaccagcaactttggcgaactataaaacaagcagcattagccaagtctattatgaaggagagcagatgagtttggtactaacctgcaagctaaacatactgacaccaccagttccttgaaccagaacggtctggcccggcctcagaggcttcaggccatatagtgcattccagctggtgagcgctgcgcacgggagggtgctagcttcgcggacatcgagattttttggcgccttgacaagacccagttcattgaatacgccatattcacgcagggtaccgtcgatcacaccacctagtccagtattcgctgcgtgtatgtcaatgtcgccgtattggtggccctgattgaagagagtcgcaactcggtcgccctttttgaattcaacgactttggatcccacttcgataacttcgccggcgccatcagatcccggcactacaggcaaattgagaggaaatggatagaggccctgtgggagagaagttagaggccggttatggcaaagtaatggtgttgcgcaaacaattcagtcaaagtataaaatattggctttctcgtgcaaaggccatacctttggaatggttaggtcgcgatagttcagcgacgcagcttggagcttcaccaagacttcattttcaccgggtttgggaacaggaacatccttgcaaacaagaccgtcgaagtcatgtttgtcatcttcaacaatccattgtttcatagtggaagaaggcattgtactaaaatgtatcaatatattcaaaaaagtatactacgtatgacaaaatgagtatgggggttgggggtttatattgaagccctctgacgtatttgacgtatcggcagatgcatccgtccgatttcagtgaccttatgacgaaaggattattaagaaggtggatatctgcttcatgtttattggtagccaagagctcctatacaggttttatgatgtgaattattaactgataggagatattacctttcgaaccttgggatatatatcaaatcacaaggttgagtagggaaatatgtaattcggtgactcggctgctgcggatcatatatccgctaataaacaggtgatcttctcacagcataatggccttgttagatgcactgggattccatgtaggtggtttaatccggcgaacatggtggcataggcgtatccagggagaagagcaaagagaatgagactaaaaggatttgatattcaaagacggaaggatagcaagaaatgaggattgttctccagggatgaagaaggtaaaaatataggatgaaggacaagaaggggataactatatgtatgacaactcaaatcgggcatataacttcccgtcaaaagtccggggtcccggcccctcaccagaacatccttcaactatgaaacgcaaaaccctgtcatacaagctgaattaagagactatcttcctctgacatatttttgaactatgccgtccgtgaaagaaggccgagtcgagaaatttaaagccaaaacaccgcgaaccacaacccgacgcgtgtccagcaaaagtgagtaaatacaccactgtcacaagcatatttcatcctcaaaacatgttttattgatttgctttaaccaaatggcgacgcgtgctaataatcccttagtcccactggttgaacagaccaacgcattatctattagcgacttcgtcgcccaatacgtgactccaccgacgcaagtaggagattcagctgaaaatgatgcgattgatcaactacatccatctcaagatcagccacagcaggatatgatccccatgtcgctcatggatgtctactctgcggcaactatccccgcggctgatctggaagcatgtctggatctgatcgagcaaacctcaagtcaagcctacatggcgtcgaacgcaggctggtcacgtaccaagaagcggaaggagatgaagttgccagatatgaagtatttgattttgcgggacgcgccgaatgataatagtgatcctagtgggcgagttccgagagagaagcagcgggatattgccgacaacaatgctccgtctccacccccgaaggaacgcgaggaatctatttcatcgcctgatactgtttctgggaacgtgcttggctttttatcatttatggtcacatacgaggacggaaaagaggttgtttactgctacgagattcacttgtcgccgacggcccggggacggggcgtcgggaggttgcttattggtcggatggaggcgatcgctggtgctgtcggcttggagaagtctatgctgacggttttcaagtcgaatgaaattgctcggcggttctatgagcggcttggttatgaggttgatgagtattcgccccgaccgcgcaagttgcgcaacgggactataaaggatgttgactatttgatcttgtcgaaaattttgaaattataatagctggatatctctttgttaagggtttgaatgctaatagtggatatgaggatagtggcgtgcatacactacacctgtcgcacctctgtgcccacttgctctgggtgttcttgctcccactcgtctctgagagcggcaaagatggtgtcggccaggaggatggagaggcccaaactccagactagagtgatggcgtagaagaaattggcatttccggatcctgcgtagatccaaaggtggtagaaagccggaccgagaagactggagtacaagattgccgagcccgcaaagaaggtataacgcatcactgtaccaaattagtcaagttgatcctgagatatgctcaattattggaaatactcacatgggaaaaggtggcgatataatggtagcaatgcgaagaacagtgatgcatctgagatgctagggtatggcttgaacacggcgaagacacccaatagcgaggtaatcacgaataatggctgacttcggaagcgagcagtgagacccccgacatagctggccaaatgaagccagaaaacgccgaggaagaactctcgaaatgagtcgaacatctcaataaaaaagtaccaccacagccccacgttcggagtcaagtctggaaccaaaagatggaaaccatatgttgccgagataaactcccaaaagttgccggtgatcagacaggataggccaagcaggcctgccacactggctagcagtaggatagcatgttggataatgaacgatccagcactgggtgggctaggtccctccaaccgccggtcatagcatagcaagaccaacgggataaatagcagcgccgggtacagagacaggtatgaagcaaatccaagggctagcatcgcattgatgctatttccgccgactgcattggagatggcgaagaggattccggatgtcgtaaatacgctggttgaccgcgctaaacatgtcgcaatagtaaggggattgaacaagaacctatccgtcgtaagcatgtagatatacatatgatggggaagccagagatttataccatgctgcaacggacactccatcccatcgaacatgttttcggactgctgagtgtagtctcgatttgactgactggcccgacgcagatatagtcatcaatgcgtacgcgttcatgaggtcgacaaggaagtagaaaattgctgttggcaagggccagctcttcgcatccgggagtagggcaaacagaggtaacaggagcggtgcctagatcatcaaattgtcaattcaaggaacggagtcgcagggatctagttccacgaacctggtggaagacgccaccatcataaggcgacacatttcttgtgtacaagaaaaggccttcttgcactacatgcaattagtttacagaatgcggagtcaataatcggagacacgtacggcgtttgaagctattaacaggtgttgagacttcgactctccccgttaacaaatcaggcaatgaaggaaaaagacatgtaagaagcagacgcagcacgaaagctgcgccaaatacagcaatcttccgtcggtctacagccatgacggggtgagggtttggttgttgattccagctggtccccatggagccaacgctctccgccttcgggcacgggccactttgttgcggtaagaaaaaaaagttatcgagaaattttcttcttcttatcagcagcccgtttagatcttttgacaaccacttttcatcatgggcaaagttaagaagaagggtatgttgaaatgaaccggcaatttcaattgaatctactgaccgtccttgcaggtacctctggcgcagccaagaactacattaccagaactcaggccgtgcgcaaacttcagatctctttgccagattttcgccgactatgcatcttcaagggtaattgcctcttctatcggtctttcatctgaatcgcaagactaacatgaattccgatatcaggtatctaccctcgcgagccccgtagtaagaagaaggcctctaagacctctacgcccaacaccaccttctattacaccaaggacatccagtatctgctacatgagccgctgctcaacaagttccgtgaccagaaggcacttgcgaagaagattgctcgctctctcggccgtggagaagtcagcgatgcctcccgcttagagaagaataacgctccgaagctcaccttggaccatgtcattaaagagcgctacccgacctttatcgatgctctccgtgatcttgatgacgctctgtctcttctcttcctctttgctacccttccctccaccgaccatgttccttctaagaccgttgcgctctgtcagcgcctttgccatgagttccagcactacctgatcatgacaaattctctgcgcagatccttcctttctattaagggcatctactaccaggctacgatccagggccaagacattatgtggcttgtgccataccgtttcgttcagcgtgtcaatggcgacgtcgattaccgtatcatggctacttttgtcgagttttacaccaccctgctgggcttcgtcaacttccgcctatactcctcaattggattgagatacccccctaagttcgatacccgcagtgacgagaacggtgccgagttggcggctttcactcttgagggccggacagtcggtcaggtgcccaaggctattgaggctagcaaggctcagagcaacggcaactctaacaaggaagtttccaaggaactccaagccaaggttgacaaggtaattaagaaggccagtttggaccagaacacggatgaggagatggtcgacactaccgacgaggcaaccgatgccatcgaccacttcgagcccgctgctcctgaagctgacaccctcccccaacctgcgatgagcggcaacgaggccggtgcactcttcgccccctttgtgttctacatttcccgtgaagcgcctaaagcccctctcgagttcattctccgctcattcggctgcaagcgtgttggatgggcctccgttctgggtgatggagctttcactaatgacgagaccgaccctcgcatcactcaccaaatcgtcgatcgcccccaacttccccagggatctcttcccgccattcctgctgccgatgagaacgctgtccagaaggtccagcctggaacccgcattcctggccgtacctacgtccagccccagtgggtctgggactgcattaacgagggtaagctcctccgagctgatctctacgcacccggtgccactctcccaccccacttgagcccttgggtcaaggctactcgcggcgcttacgacccgcgcgccacccttgccgatcaggaggaggaggatgaagccgagattgccgccgaggcctctgatagcgatgaggagatggaggacgagcccgcggctgacgctaagcctgctactgctgaagagtccgaggaagagtctgtcgatggaggcatggatgtcgccggcactgacgacgagagcgaggaggagtctgaggaggaagtcgaagacttcggcggctttgaagaggaagccgcatccgagtccgaagacgacgatgaggctgcccgcactcggcaccagaaggagctcgaggccgaagccgctggtctgcctttcaccgccaacgccgccactgatgaagctgccaagaagaagtcttccaagtccaagaaggtcgctgcgaagaagcgtagcgaggacgaggagcttgagagacagaagatgatgatgagtcggaagaagcgcaagctgcttgagaagatgatgtattccaacaagaagactgctgatgagtccgccaagctccgctccaagagacgcaagcttgagaagggcgagaagggcgagaagaaataaagctcggatcatttgtgcatgttagatagtgcttttgccgggcgttgcggtttggatatgtcccatgtataggcacctcaaaaattttgtgaagttttaatgctatttacgggatgacaccccagttatatgtatacctttgcccctgccatattggaacaacacgtttatcgtaaccctaggctgtgacctcggaagtaaatggtctttgaaatttgcgtgtgcttttcccatgttgccatccacgcgaacacgcacaactcgattttggaaatggaattcaggtcgcttgctttaaagattgatagaaaagtcccgtgtcgtagccatgatatagatgcagatgctgttgcacccacacgtgaagaataccatgatgtcgaaggtcgacagtaaaacgggctgcgatcgttgacttttgtgggatttcctagtcatgttttatagcaggttttcgttccttctgctgagaatattttctaggtcaatcaccttagtccgccctgaatctcggtatcaaggatgttcagcatggcatcagttgcgcccaaggtagcggtgcgagattaaaagtggccgaggtggtactggacaatatagtacgagcgaagggcttctcgaatgcgtatggcggccggccttagattcatcgtctgggtacggtatcgtacgtctggattctgggcctagactttgagaatacctttgtgaaggaacgagattgaaaagacggttcgtccgaataatacatttacacccaggctcggagaggacgtatgaaggccctcgggatcacttacaaagggtggaatatccaagacgaagcaaactgacccgcaggatatcttcttattcgtcaaaagtcaccattcggaaactccccgcggttggtgtcaaggttgcggctgatatttcctaatttggaaggaaggtccgattaagctcccgaggtcggatataaggctcggggcctactcttgccgatcaacaaattcaggacgatgaaaatattcatcagattcatagctatcgttttcctcactgtaatcactctcttgtacctctccattcggtcacaaactcaccggccaaccgtcaccgaaatgtctttccggttacatctcgttcggcacgcagaggggatacacaaccccggccacgacacaaccattctcgatcctccattgacagaaaaggggatcgcacaatgcctgaaactctgcgaagactttccgttcaaggagagtgttggcctagtaatgacatctccgctccgacgcactcttcaaacagcacgtctgggcttccaacaaaccatcgatgagaagttttacgcccaaggctccggggcaggagttcaaaatggagcaacccttttgttagagccagatgtgcaagcacactccgctcggccatgtgacactggctcagatatcgcgattttacgttcggagttttacgatctcccatgggaaatcttggatttagatcccacattcccagcaaaggaggggctttatgccagtgatccggagagcttgagtctgcgcggagcacgaattcagcgtcgattggagcagaaatttaaagaactgaaggacagcaaaagacctgacattgccgttgttacacatggcgggtttttgagctccgtcatcggtcaggagaaaacagaagtcggacaagcaaggtggaagacgttcatggtgacattcgatcaggattcgagaattgattcgagaattcttgtggaatcagagtgagaatgtccaagtcgttgattccgttggtgcatgaaatagaccgaacctgtgcttttccgcttagatttctttttctctttgtaactatcatatcggatgagaaataattcaccatgtccaaacagcagaaatgtcgaaataaatttccgaagtccgcatcagccctatctccgagtctaaaccacgatctacaaccccacatttatacccgacaggttccaaggttacctcctgctaagatttcgaagttaccatccgtggagatctgaggatttgatgtccgaaactcgtggtttttgcaagaatcaattactggtagaaaaaaagacaaattcgatgctagtgctcgccgtgtcacgatctttaaaaccctcttcgatgaccttcatggatttatgttggtaacaacagcagtcaggcatgggaaagtgccggagagctcagccgcaacctcagcccgccagcacctggcgctggctctcgtgttcaatgtgagcttttagtgctgagcaatctgtgaaacctttcgtgacgcctactttccaaatgtagtggacaacataggtcggtctattttgtgtgaatatatatattgtggctacagaattgccgatttttggaaactaaagagcaatcaatatcctttcgctgtactacatgcgaaacaggctgggctgggctgatattggcacttcgctgactccggttggtcatgtctcacggttccatcgatatttcatctcaccagtcgttatcaataatacttcgaatgtaatccattgtcgctctgtaatctatgtggcaaactgagaatctgatgctgttacaaattctagggcgtcgaacctagaaaagcactgtccaggaatgccgactaaagcaatctgaattcttcttgtcgaggtgctcatttcctgtagtagtatatctcgatccgattttttaagctgaggcctcctctcatacagacctctgtcccaggccggtatctcggcgaagtgtttaccagttcacgccgaggtccaatatttcttctcgttgagcatagaatgcaaccatataatacatatgtagctgcaagtggcaagtttgaaatatcattctgcctcttttaattattattccatggattcgacgcccctggcatggcaaatggcgtggttagggttactctaggaagtatgcagagtctacccttgttccaggccctattccagacgctcttctgacggtcaaactatcatgaagcaaggcaaggatgttgagtattcgttgaatatacaggcactaaaccaataattgtaaggtaataagttgttgtcctgctgacgggtgccattaaccgaaggattctatcaaaatacccacgatgaatggattatttgcaggtaaacaattccatataacgttcaggtaaacaccctcaaacctatggctaataattatatatatagccacctatatgtaggtcgcaccttccaaggttccatccccgcattccatattagtacagggacaacttttgatttcgagtaacattggaagagccctggaaaaaccatcttcccctgagaccattgtatttctaaaattgtcccgttcgaaatgcgtttgagcattattactgtcgtgggcctcgcaatcgcccctgtgttagctaattgcccttatgcccgagatgcgggtaccgaggttgacaacagtgctaaccttcatgctcacttgcctcgcgatgccattcgaagcaagccaaccacaggtgttgcgtctcctctcccttccgcaacagctgggaaaaaaggtctgctgttgatgaaccgcattgcccccggtacctcagaattatacatcgccaacgcggacggaaccaacgagcgtcctctgttgaaagatcccggttatgaatatcacgctgagttttctcccgacggtgaatggattagcttcactagtgagcgtgacggtgatggaaactccgatatctggagagtgcacccagatggctccgatctacagccgattgtgaaatccccagcagcggaagacagcgttgtcatctcacccgatggaacattagcagcatatgtttcaactgctaacaagtacaacgctaatatttgggttaagaacttggagaccggtgccgagtggaacatcaccgataccccggctaaccgaccagatgaggacatgatgcacgggcactttcgtccagcctggtcaccagacggagattggcttgcattttcctcagatcgcaacacaatatgggatggccacggaaaacctacgtatcttggcctcgctggctgggagcatacccaagaactcggcatttatattattcgccccgatggttcagatctgcgccttgtcgcccaccgtgcttcccactgccttgggtctcccaaatggtcacctgatggcaagcgcctcatattctacgagatgactcgtaatgggacgtgggatgcacatagacctgagctcgtggcagatggtaactccacaattgtgtctattgggatcaatggcattgaccgtcgaaccgaggttggcggtcctggtatcaagacctttccccagtacgtgacgaactccaccattgggtaccatctgaagggcggcgataaggagggcttgtatctcacaaacggtacttacgtcaacaccactattcgctctccctcatggtctactgatggaaagtatgtggtttacgagaaagctgtttggtctatccgccctctcttcaaggagctttacagctgggatagcgaatgggattaccgcttcactgatatattccctcaattatcgtcgaacgaccgcgtggctatgactgaaaagcaacttggcaactcctccattgcaacctttgatctagaggatagacatgcctccttggtatataagcctaatgatacgagtctaatcgacactactctaattggagaaggcctggccggggcctacaatcccagctggtctccagatggcgagtggattgtcttcggagtaggtgcctggtttgaggcgcgtgattggcgaggaggctggattttacgctccaccgcaaacggcagccacaccgaggtcctcaccaccagcaagctctttatcaatcaaaccaagtacctcaacaccggctttcccagcttctcgcacgatggcaagaaggtcgtctaccgcgtgtggggtgccgagaccgccaagtacggcgacgaaacagagattggtttacgcatgatcgacattgagaccagagagattacccagcttaccagcggctgggataaccttccctctttctcgcccgatggtgaatttatagtgtttacccgcaaggtttctccgaccaactacgacgtctgcatcatccgccctgacggtactgatttccgcattctgacttccagcggcgccaacgatgcccacgctgtttggcgccaggatggaaaaattatgtggtcctccggcatgtatggattccagtatgagtgcgctttgtatgaggagactttccagccctacggtcagatcatgatcatggatcccgatggatccaataagcgtgctttgactaattccatttgggaggattccatgccgctctttcttcctaacgattggttctagaatgcggcttgaaaatgtaaagtagggtggcttcgccttgttctctcattgatcatgtccctttccattcgctttggataattaaatagagccgtctgtctatattactatgaaaattttatcattactctcttcaagatgattgtacgtctgtctgttccacgttccattgaacgaaatatagataaaagtcaggagaatggtgtaacttaatcctttgcgagaacctaaccctgagggcgctgaaaaatagatcagcccggacgtatatctgttcgtagaggggctaagttacagaccacatgttgttttttggacgcaaaccgcgctcactactacctacatatgttccagggtagcacaccagcctcttcagagaaattcatccttatctacttatagaacttgaccgaggataaatggccggtcgctaaactgtgataactctcagaaatcagattagaaccatacactactattttgggactagcgtacatattctgtaatatatcgatcacgtgactgtgccgatgatccactcgatttttgacatcttcaaccaggaacaatcgaactgtcggacaggagacccaaaattcaccattcagagtctcggttacagagggttgggacagtggttgttcctttgacctttagtcggatgttgcctaataaaaatccgcatctatgtgacatctaggcactccagatccgaacctttcgcccataagagaccaaagtttcttcccgtcatgtcatctttatatgggagccagtctacttggccagaaaatattccaccacaatctgcacagccgcaccgatcattatttggaggcccaagcagtgatgtcttgcaaccttcttctcagctagaaccgccaagaagttctctttttggaggaggccccatcgaacaagatgcccctctagagcccttttccgaagcagatcttatggatgaggagctagaccaaaacgaaaatgaaattgacgtgataatgcaagggcagcccttggcgttacagaatgactctgatgacgaaagccagggaaataatcgtggcagaagtcgcatacactcaaaaagggcacaggagtctccacttgacccaatctactacgtagttgatcgaggtcttgacctgccacctggagttgagcgtcctaatctatttgacgggcacgccacttcgtggaggaactacaacgccgatgacatcggagcctataatgcaattgttaccaaccgaaccagagatttggcagctcatctttacaatgctcacgtggttcgcaagcgagcgcaggacactgcccgggagaatcccggggtcgacaaagtgccattgcgtgtgaacaaacgatgggctgcatggcctgttcatgcagccacagttccccgtgccaacgagatcattcagagggtaatggatgcctctgataattttcagatgcaacccgatccccgacctagtgccggattggaagaatgcatcacagcgttcatactgaagacctccaaggagaccttccaagcccgagaatgggattcggaagaaattaaacataattctcggaataaaatgaacgacgggaaggaactgatggaagatgaattggggaaaaatgaagagaacgaagaagcgcgtgttgatgtaagaaccctccgaccgacagtcctcctcgacgacgacacagccattcgccaattacgtccgttggtccgcaatgtgatatcgcaagttgaccggctgctatacgggctccattgcgcgatgaagggtcgcaagttcgaggaagaatctggtgaagagcaatggagtgattcggacggagaccatcagacccgacacagccgcaaactcagaagcaggagtcgatcacgtggtcggagaagtgctcgacaggagtctcagaagcgaaacatatcacgtccttccaacagtgcacatatatccactagaccggagacaaaggatgaaaatctgccaaacgtttcccacacccgagcacaatctcgtggtttctctactggccacgagagcagtcatcacatcaatggccgactcaaactgcgagactggagtgaagttatgggactggcatcaatgattggcctcccaagctccgcggtaatgcgtgcgtcaaagcgatgcgccgaccttttcggtgaagatatggaattccgaataatgcccgaaggccgggtaagaaaaagaaaaaaggtagatgctcgagaagaatatgcctacaccgagagcgcgagcgatagtgactcgaagccactaagtgttcagccaattcctcggccagtcggccagccaacccgcaaacgcaaaaccgaccctgggctcggacccaaagccaaagcgaagattccaggccagcgacgatcgaagtcacacatgacccctgcaattgttccttcctcgtccccagccccggaagagccaacagaatctagagaggctattgcagaaaacacaagacgagccatcgctcaggggtcaaggacggttaaaccaggtgttggaaagggccctcatcgaaaattggatattgtctgtcattttaggtcttgcaatcgacatacgaatggattttcgcgaaaatggaacctcaaccaacatttgaaaaaagctcatggtataaatgttgctcctgggaatgaacgttcgattgagcgggatgctacggtcattgtgctcgattaggtattccattttaattagcaagctcgaaatcgcacaatctgtattagcgtccataaattagtgccggcttgatgaagacgctttgaattctgcatttcggactggtgtagaaaaacaattccagctcctgattagtgagctagagagggctagttacaatgctacgtcctgttataaaagacgcagaatgaaggaaaaggtcttgattatggtgccgtcaatgaatgtactcgatgcttttctttccttttttcaatagctaaacctcacggccaagacatgtatggcttcggtcctttgtttgaattcttcttttcttttccctcttgataaccaaatgactgactgaatcaaggaattgtcttgcatacttcagatgtaccatgagtcgagaccttgttgcctatactgataggcttggttttgctgcggaatcggaggccattcgtctttccggtacttttggttgcatctcgattcgctgatagaagcagagacgaccaccgaaaggcaaggtctttgcgctccaagtagcggtccatccgtggaagggcaagtcctaaccagagcattctttcattatcccagaagcttacaccaaacctctggaattctccgcggaagccggcgattttgacaccggactgaggcaccgctgagcaattctgtgcaaagaagcaacctgggaggtggatgtgttggagattatccaagccacgcgagcgttggcagtcgctcagcgaggtaaatttcgggcaacatattgtaaactttgctgctcgcttgcgtgatttgttttcgtgcatccaagacagcacagtctctagctgttctatcggctctgttctcatccaaccgtaacaggcaaaggtcctccagaaatcaatcaacaaattcccctgtagatacatcaacgtgtgcgggaacttcgtacctgggggaggagaattggtatttagtagcctcttctcgcagacgattcgtcgcagtactgagaagatgtatggtttcaagaaggcttgcatcagtcgctgttcctccaaccaggtgggaggataccctccctccctggtgccgatgtgaaccggaatcccgggaggtcgagtcccgttttttggccacggcgacttccgattctcgagcttctgtatatcggcagacaagcacagagtcatagcatcgtggaagaaggcgtgtgcatccccgcgaatgcggcttgtgaggcttagaagataacgaagaatctttggaggagttgagtgcggaagtcgaatgcagccgaccttgattggctcactgaagccctctcttgctatgttaatgctgtagaccaattcatcgtgaaaactgacgggtaatggattatcatccgaaggaatccccgaagccacggactcttctttccaccaaagatagaccaatgtccgaaagaacacacgggtatcttcgcttagaccccgctcatggtcccactgatcgatgattctttcaactagctttggaaagaatccaattttgtgattgagatagtcggaaacagcaggtgaagcttggcacaattgatgcaaagttggtaagtctggcaggtgaaggagaagctcttcgagaccgaaccatggaagacgtccgaatggatccttggtctctgggtttggatcgagagaacaccgaagagagaacgaggaacagagctttgaacccactgaaagcgagggcggacaatcatcgcatctatcgtccctagtggcaggactcctgatgtgctgaatctcatcagggagagtagagttagcgtgctggagatttgaagtcatgatgctcgattccggaggatatggggcaaaagagatgaaagggccgaggccctagcttatacccagcgaatgaatagatgccgagaatctgatgaggtgtgttgtagtatgtattctcaaaggcactaaccttcaagccaagcaacgtaaagatctgttttgggttaaactgggttcaaaccaggattgtggagcttggtccaatggcataaaaggtgctggataaagtggtgaagaagggatatgatgatgaaaaggatgaagtagtgaaatgaagaaggttaatggtaaagatgggtagggtgaagaaggaaaatggtgtattattgtcgattggtctcgcgaggtccaatgattccttccaaggcggtacgagagtgttggtttcatgtttcctattcagatacttatagaagttattgcctaggggaccacagtcagaatctcatctgctacatccaacggctttcttagggcaaggcatcctaaaacggccaagaccaaaacgaaaggcttggctaagatggaaggaaaatcagtagagtcctgttagcatgcaattacctacttatacatagtagatgaggccaaatgtgtgtcagatagtttcatatcgcgagtgagtagtccttggatctcgccagaccgtaacctattggcatcctagggtatccatactgctcctatcagagctatagtgctttgacagtaagtttattcagaagggtacttatattagaggatagtatgtacttactatgacccttctcccttcgagggtaagtcgtggatgagctcggggtattacacatacactatctcaaggccggaggttcattttctattttgattggctacaaaccccgtattttatcacagctcaaattctcattggctcatattaccgagtcctgtaataccgatttccaaattaccgaaattaccagatctatgaaatgaaccattctctacagaaagaggtttctctatttcattcaatttttccttaatcgaacttgaaaaaagacaatacaaaatgcaacagaacatcaagcaaaacaaaagaaacaataacaacagccacaacaatcacagccgttgatctatgccgttatgtgcagaatgacatcaactccgcagatctccgcttgaagctatggagcttcgaagattaccagaatcgcattctttagcacattaccattacacatattcggtgcttctcggacgcagagagcaatcaccattgagctaacccccactagaattgctgaattgctgaattgctgaattgctccctttaaaggcatctccaactctcctactcccccgcaattttctccatcttcccgtgtgatttctctcttcaaggcccaacctcaccttgatttataatggaccgcatcatccgccctgtcgctcgccaattattgagaccccgaccgagatatcctttttcaattcctccgacagctcacgcacagagattatacagcatgaaacacggcgcgccgcaggtaagatctgtagtcgaatgtgatttccatagttcgtactgatcgattacagttgaaagaccagtcgcttttcattcagaaggcgtacattaatggcgagtgggtcgatgcgaagtccggcaagactttcgatgtctacggtaggtaccaaattgaatattcgggttcaaggtggtcgctgacttttcgtcctattcagacccagcgactggaaaattgatcggaacttgccccgagctcgatacctccgatgttgagaaggcgattcaggccgcttccgaggccttccccaaattccgcacaacgctaggccgcgagcgcgcgcgcatgctgcgccgctggtatgatttgttggtcgcgaatgcggatgatcttgctaagctgattacatgggagaacggaaagcccctggcggacgcgaagggcgaggtcaactacgccgccagcttcttcgagtggttcagtgaggaggcaccccgcacatacggcgacacaatccccgcttccatccccggaaaccgggtcatgactgttaagcagcctgttggtgtgtgtggtttgattacgccatggaacttccccgcggcgatgattacccggaagattggccctgccctagcggcgggctgcacggtcgtggccaagtctccccaggagacgcccttcacagcgaacgcgatcgctgagcttgcgcaccgggctggcatccccaagggtgttgtcaactttgttacctcctcgaagaacaccccggcggtgggtgagctccttaccacccaccccgaggtgcgtaaagtgtcattcaccggctctaccaacgttggccgcatcctcgggaagcaggctgcgtctacaattaagaaggtctcctgggagctcggcggtaatgcgccattcatcgttttcgacgacgtcgatgacctcgacgctgccgtgaccggcgccatcaactccaagttccgcagctctggtcagacctgcgtgtgcgctaaccggatctatatccaagaaggtgtttatgaggagtttaccaagcgctttgtcgagaaggttaaggacttcaagctcggtggtggtttcgatgccggtatcacccacggacctgtcattcacgagcgcgccgccaacaaggcccatgaacatgtgctggatgctgtttccaaaggcgccaaggttgttattggtggtcagagggctaccgcgctcggacctaacttctaccaccccactgttctgaccggcatgaccaaggatatgcttctcgcttgcgaggagactttcggccccgtggctggtcttttccccttcaagaccgagaaggaggttgttgagctggctaaccatgccgaggtcggtcttgctggttacttcttcagtggtaatgttcgccgcatcttccgcgttgccgaagccctagaggttggcatggttggtgtcaacactggtttgattagtgacgttgcctctccgtaagttaaaatctcccacattgctatatcaggctctaacctttctacagattcggtggtgtcaagcagagtggcttcggccgtgagggcagcaagtatggtattgatgagttcatgactatcaagacgataacttttggtggcatgagtctgcctctgcaggagtaaaaattggatacgaatgatttatttgcaaactatatattatgccttaagatgaataaaatctaccatggattcatatgaacattttgctcttctacacaatcatacttgctttacaaatattatatcctgcatatatacttcaaagattgcggtcgtgccattgagtcttccgtcatatagtgatcacctgaccgtgaacacaatgcggcagaaatatccactgcctcgccgccttctgtatcccttcccctacaacaagctaataattggcatctctatcatcagaaagaaaaagctttgacgggagcagttttttttttttttttctaaatgaggtcatggtttgatctactccaatgcgttcctcacttcgtttcctcgcggcggtctcacacacccggccctccaagctgaagaaaccttctatcagtctagaccatgtaagtaactcaagcttgggttgaagtatatgtactaattgaatcatacagtttatccagagacagcgggtgttgtcattctggcgggaaatcatgcgagcattaataagtgtgcccaccgttccagtttctagaagccatgtatgacactaacagacatgctcagaggtgccaccttcgtcaacacggactgagctacacagatatgcacgtgatgaattcgaacgccatcgaaatgtatcggatctggtaagttgatttcggatgttttctatggcaaggttcagatctgagaatacttgactgacctttcttcagcaacacataagatacttgctttcggtatgaaattttggtgttatactataatattatagattgctaatgagattaaagacaggcaaatcagagttcgagacgatgaggcggtatattgacgaacagatcgctggttgacctgtgttaggaatgtgtatattatggtgtcaaatcaactcaaggcatgtattgccgagctaccgagctaagagtgcataccgttgaagaacggttgatattagagggtcgacctctatagttgacaaggcagttctcggtcgaaaggagcttccctgttgcgttccaatagaacgggtgggatgtggtgggatgtggtggggagaacttccgagggtctctccacatcaagacattcacgtcgatataggagtctctaaacattgacggagattgtacggagccgggtctgatgaaggttacgtcttcaattctcgaatatagacattgtattctgctacattgtcctctccaaacaccccgagtgtatttcaacctcatgtggctgaggcctagactattggatggcaggcacaaccggaaacggctgccaggttacagctgtctagaagcttgctttcatattttcaatcctgcccagatccttaacatacagagtgtagtacgtcattgattttggtccaggctcttttatatatttgggagtccaaggttgcggcgtgttcatcgaatttctactacattgtgtagattcttgaaattacacccctcaattataatttacattctaaaggtattcactattaattcaagtcctttatcacctccaatacctccctaggagaccaaaaccatgaaatccgtctcatccgcctcatcctcccaatccgtcagccctcggcgggcaaagcacctggaacgaaaccgcgtcgccgccaacaaatgccgcgaaagaaagaagagggaacataagcaaatcgagcgtcggctcacccacgaaaccgaaaagaaagacatcctcatagcacagttgaattgcctacgagaagaactgtgggatttgaaaaacctcgttttccagcacgccgagtgccaagaccacgaaatcaaccaccagctcgccaggatgacccagaccgtcctgcaaacccattccaacccggatgtcggtccttccttgcccaccggctcatcgccgacattctcgactgggacgtggtccgatgagtcggtcgcagataacgccaaccctaccggaccgggcgcgtacaataacgattggacaatgttgcctgcaatcccgaccgaatttgcgccgtacgagccgaatggctttactgattccatgtttgagaactttatcgatacggacaatgggtttacttgaagaaataagcttccgttggttggctgttctctcttttctgcttagcgatggctgtatattaatctcagggctgcaaccccagaaaagcccgtaccaaaactcatattgggaacttttcatagttacgaaacaacgaatctacgaatcagtctatgacatggagacctatttccgcataaacattcctaaaaataggcctcatgttcctgcacaagcctaagccctggaattcccgaaactggtcgggtcacacggggtagatacgaagatccaccgtgcaatgcaatgcaaagcgaatgatcgcgaatcatcgcgaatgatcatgattcttctgtttcttgtctgcatgtgctggattatgtggggagatccacaaagcctctgatgtcactacccgagcacttgtgacggcatcgaacggttagtatacattggatttctatttattctgaagattcctttcgattcatataattcatactattcatatcatactttgttacatgtttctctcgctgatccctgtattatagccattatttacttctatattctcctcaatgatgcctacaggcttacctacgccaccttacggggagcgaatggcaaccttttcccagaaatcagtaatgggtacactatttgagacaactgaacggttagaaaaaaccaaagccgctgatatttgggcgagatcttgtatgctaagactatacgaaccagctacacagaatggaaacctcttggacttggggtatctgggcttgtctggtattatttcctggagcagttctatcaccagccagaactaacatttaattacatagctctgcaagagatcagcttgctcatcggactgtcgctgtgaagaaactctcggaacctttcaagacaccggctattgcaagacacatgtttcgagaaatgaaactactgcgacagttgcgacatgaaaacgtgagaattgccttgcgcagtatggaacggctgtctaattgcccgctagatcatcaacctgaccgatatctttatttctccctcagaagacatgtatgaagagacctctctccttacatgggaaagtactaattactctagatacattgtgaccgaactcatggcaacagaccttgatacaatattgaaggcgaaaagagtcgaagatcaattcgcccaatacttcatgtatcaaataatggttagtatcatctaccaacccccgcccagaacgcacgtgttcctaacaacaattccagcgtggcctgaaatatctccattcagccggtgtcatccacagagatctaaaaccaagcaacattctggtaaacgagaactgtgacctgaaaatatgtgacttcggcctggcccggatccaagagtcacacatgaccggctatgtctcgacgaggtactaccgtgctcccgagataatgctcacatggcgaaagtataatgaaaaagtcgacatctggagtgccgggtgcatcttcgcggaattacttctgggggagcctttgttccctggaaagaaccatatcaaccagttctgtgttatcaccgatctccttgggagcccccctgaagaagtcatcaacaatatcacaagtgaaaatgtgagcgaggtcatactctgaaattatattatacccaccgaaaggggttttctgattacttttccattttctgcagacgttgaactttatcaactcactcccaaagcgagcccgcactccaatatcacagctcattcccaaggcgaatgtaaatggtatgtttcaagctatcgctttccttgaaagcctcaattatacatctgaaccagaaagaaagaaagaaagcaaaaaatactaaccaaatcagcggcggaattaatcgatcaaatgcttcaattggaccctcaagtacgaatctccgcagcagaagccctctcatccccatatctcgcaccataccacgaccccaatgacgaaccagtcgctgcggaaacattcgactgggccttcctcgaagcagaactcccagccgatatctggaagaccatcatgtcagtagtcaatcctaaatgcagtacatgccaacatctctccggacattctgctgattatttctagctacggcgaggtgctgggattccatgcagaaatgaaccagactggccagagtgggccaatgaaatcgataaaccaggtggacgggatggatatcggttaaaatttaacgctagagtagattcatgatgaagatttccatttttgggtatgattgcttttaacggtgttgtaaactgagctgcaccgcccggataaggagagaaatggagtaaggacagattatcgtattaatattgggttgatacatgaccagaccatttctggtatatcaagatcatataaacaggggcagacatatgttcgtcaaatcaactaagtggggtatcgctttcatataggaaacccaaccgcgtgcgtatcatagcttgcaagatgtgcaagtgccgttagtacctaaacatatcctcaggggatacctagacagccccatcggcagtggcggtagtggtagtattgccgttggtattcgcatcagcagcactcatctccggggaagcatcatcacggtgattcttcgcgttgcggcgagagttcttaaggtctatgatggcgaaggtatttgtgacaacgaaagtagccctgctcagaaccacaggttagataatgtatgcatgcgtcaatccttaggcatctgttttaccattgcacggccccgacgacaatcaaagcctggagggcgtggcagctggaatagtggcatgcgccaggcgagggaatcattgcagccaaggcgatccagccgctgagccagaggccgccggtgagcagctctatgagaggaattgcgatttcatgcgagaagcgagggaagcgtaggggtgcgaggcccaggtatgggactgcgatggctgttgtccagcagccgttgaagagcatgtagtagactacattcgagtaggaccatttgtcgtacagagaggcaatttctagatggagtcagtgctgtcatggagtactttgtggatagtcaaacataccatatgcggtaagaccaatcgtggctagggacaggatggcctgcacgattcgcaatgggttgatccaggaaagcattttgaatgtggaaatggttctttttgttgagtatagcgtacaggtgggtagtcgatttgacaggggtatggaggaaaggattaggaaacgagaagatctacagtcgtaagggaatatcatgggcttttatactcgtgagagacggcctataaggcgactagcttgtgttccacacgtcatggtactgtgattcggaaaagaatgtgccttgggaaagtcttgaaagagttaggctgcatgaggggtggagtctcggggtaactgaaaagtttgacccagggtcattctgatagaccctggagctttccaaattagggtttggtgttggctcaacttccccgcattctaggtttctatcatgcgcaccatattagtcttcaggatgagaagcgttcatcttagactctttcatactctaagaattcaatactatttcaaaaccactcccttgacggcactcccgttccgaataagcactgattatgttaggttgccgcacgctagctttgtcgatctcacatgaaagcctcggccaaggaaacaaactcggccatgctgatccaaaatcaacgtgctgtttcgtaaattccagatgctgccaaaaaggtggtttaccatctgctagtggcgtgattgtttgggatcaattgagatatttcaacctcggtacgtcgatcatcatccccgtacacagtacgaccccagacgagccaatcgtacttctgtcactcatgcttatggattctagaacggcataattcatcagttgagaatccacatactatcggagaatttggatgcatatgtacaaaaataaaaaagaacctctcctatcttacaaagcgcacgccatcagttccgcgagataagagccctgacggcatccataaccccaatagacttctcatccgcaggctcgatcgatgaccgtgccgcttcagactcagaacgaggcgccggtttattcccggcctccttggccgcagcgtcaatggcagcgtgacgctccctccactcgcgatcctccttatcacgaatctctagctcgcgcaaccacgcatcacgcttttcttgcttcttccgaagttccactgcttggtcgaattcccggcgctgttgccgctccgtcttgaagtacattccgccggcgactagggcgactagtgtgaaggcttgtgcgtagatacgggctcggaacattcggttcatttcaaccgagtcaccgattttcatcgaccggtaggcgcggtagagggcatagcatgttgcggcgcatcctgtggcagtatgtattagttttggttttcaatgttgggagggaaattccaaagtcaagatgagggcttgtgcagatggatttcgtaccaagtggaaccaggggttcttccttgagacgtcgtttgaatttttgaacgccggtctcttctgtaaattgactgtccgagaccgagtgttagcagacgagccttcccttcgcttcctctgcggcattgtcgggttccgcttgcggagcacgcggctaatgtgtgatacatacgggttctcctcgtcaaaagacgaaggaacaggttcccggttcatcgtgaagttgatcgtggtcgggtatgttgacggtcgtgcggagttcaattgcgtccacgggatgcggagttttcgtcacggggatattcagccgagttttataatgggtagttatgtagcaaagattagatcatcaagtcggggggcatgagggttgggaagtgtcgatgttggaataggctcaagatgctggagcgcaaagggtcgagctgtggtatgacgccaagttttcaaacatattgggttatgtaactatctggcccagccctggagccctggaggccatgtatttacaatgctacaacgacatcagggttcctgctttacatgtttctgtttgtaaatctcttatgtcggattggtctaaaataaaataacccaagcataagccattcctatactagtagcccctcattgttgaccgctatctacatctgcttgtcgtgcctgctacccaacgttgtctcctttcattcagtccaaggaacacactgtttcatatttgtctgaaagatttccattcgttttgatctcatctcctcttatatcaccctttcgacactcctaaatcaagctttatttcactaactagggctagttagcactcggggttgatgacataagggactccgatcaccggtcccgccttaagaaaaaagagtcaaagttcagaatttcccggctctcaaattctttctgatcagcattgggattgattgtcttcatcgtttggcagaaacgtttggcagaaatcagcctgaacttatcatgtccgacgaggctcccaacggcgccacgacgcccgtcactcccaagacgagcgggcttgcgctgactgagtataccgccgctccgacgccgccctctgaacgtgagcaaaggaccccaggattgcctcctaattggggaattcccgaagcttttctgcttcccaacggctacccagatgtaattcaagttctgcaataccccactgaatcttcaaattctaacactgccccgccattctagtatctccggttgattttgacgtcacgagtttacgatgttattgaagaaagccctcttacccatgctgtcaacctgagtagccggttggaaagccgggtgcttctcaagcgcgaggatctgcttccggtgttcagcttcaagctccgtggcgcatacaacaagatggctcatttgagtgatgagcagcgctggaagggcgttgttgcttgctctgctggtgagtttataactggtagataatgcaaaatggaaacgccttctgactcactcgacataggaaatcatgctcaaggtgtggccttttctgcccgcaagctgagaatccccgctaccatcgtcatgccctccggcacccctgccattaaacacctgaatgttgctcgcttgggaggaagtgtggttcttcacggaatggacttcgatgctgccaaagatgaggctcaccgattagagaagctgcatggtctaacgaacattccaccgttcgacgacccttatgtcattgctggccaaggtaccatcggcatggagcttctgcgccaagcaaacttggacaagctcgaggcagtcttctgtgctgttggaggaggtggtcttattgccggcatcggagtttacctcaagcgcatcgcaccccaggtgaaggtcatcggtgtcgaggcttacgatgccaacgctatggcccagtccctcgatgcgggtaaacgagtcttcctcaaggaggttgggctctttgcagatggtgcagcagtgaagtctgttggcgaggaaacttggcgtctcagccgggaggtcatcgacgaagtcatccaggtgtccaccgacgagacctgcgcggctatcaaggacgccttcgaggacacccggtccatcgttgagcctgccggtgctctcgctcttgccggtctcaagaagtatattgccaagaaccctagccctgaccccaaccgcgagcttattgccattacctccggtgctaatatggacttcgaccgtctgcggtttgttgctgagcgcgcagctctcggtgagaagaaggaggctcttcttagcgtgaagatccccgagaagcccggcgcgttcgccaagctcgttgaaactgtcctgccccacgccgttaccgcgttcaactaccggtacgcccgcgcagattcggctgatgtgctgatgggtatctcgctatctgcctctactggccgcgaagacttggccaagatcatgggagagctggaaaaggccggcatgagctgccgggatttgagtgatgacgaacttgccaagcgccatgtgcgcttcctcgttggcggccgctgcgaggctgccgatgagcgcatcttcatgttcgagtttcccgagcgtccaggtgctctcgccaagttcctcaccacccttcgtccggaacagaatatctctctgttccactatcgaaactacggcggtgatgtcggcaaggttctagctggaatccagtgcccgtcgcccgagaaggaggacttggaggccttccttcgggatttgggctatccgttcagtgagcacactgactcgcccacttacaagaccttcttgcgttccgaataaacattttgttctaaaattgcaaaagaagggaaggtgggtaacgagaaatgtattgttcatagcttgttatggtttcagcggtttaaggtccaggcctgttttgtctcttgtttggcgtttggttgattttgatagaccctttgtattataggtcacatagtctacttttagggttctcactacatactagcataagtacaaataccctcaaatcttctttttcttattatcgagcattaaaacagacttttctatcgagacactcaataaatccacatttcgcattgtcattctgttttacttgtagtataaaacggaccaatcacagcggccactcgcatcggctgaccggcgatacagaagctccggccaacatttgcgatcgcagcacaactaaagaaccttggaagccaaacatcaacctcgcaccgcaccccgatacctcttttgttcttcataaggaacatttgaggcgcagcctccacttgatcgtcttttgggaagataaaacagaatcaaaacccgccgccatgttttccctccgcgccgttttcggtgcctcctccggggccctccgccagttcttcccctctgtgaccacccggaccgcctcattacggcctttctcacacatgattcgcaacagcctgacaagactccgtggacaagcaaagtccggcaatgctgttgctgtggcgaatgggtctgctaaacaggtggagcaggttcgaggaatgaagactcggtcttctgttaagagactatgcgatggctgcaaggtatgatctaggatattgaacagcttcaatgctggaatgattgcgaagtcatgttgtctggtgctgactttgaatagcccgttcaccgcaaaggccgtgtctacattatctggtgagtggaccctgtgacattgaagcccggagttgttcggttttaatatgtttttttcttggtcttttagctcgaagaaccctaagcacaagcaacggcaggggaaatagagtcgtcactttccatcattttctccgatagcttgcatcgctttatccttccgcggcagcctttactcgaacagtctgagatattggcgatacttctaggcataaaaacatgctctcaataaccaggttgtcttcagctgccttggatacacgacttgccgtggcggaactcgtacggcggcatatttttgcattcttgttacaaaaccagacagtggtaccacggcgcttgtgtattttccttgtatattagtgtgacaatcaagtttatttggtcttcatgtttcgatccaattcatcctaatctccagtctttctcagatgcccaatatctatggatatatgcgcaccttactccaaccaacggcttgtcgccctactcaaacctccacgaccaagatatggccgttttcaatatcgatatctcattttatggctagctatacaccgaattgtaatctaccggctctgatgggccgatgtaaatagtcacgtgatgcgttcctggcttccccgaacttttttttcggagccaactaaacatccaattcgcgttgatcatctcaattttggagtggttggatcatcaccatgcggtctccttatcttgcacggttacaaacccgtgcggtgtttggtctaaccagatcagctcgtttccaaccccagactcttctgcgccagcgatgcgcttcaacgcccgcgttccggtccgccgctgttgcgccggcttatcagtcgaagctgggacaatgggaccagcgccgaaattcctctgctgttgcttctgcggtgtaagtatgcttgtcgacccgatctgtttcttttgctctttttaatgttgttattagtctcgaggctgctaaggccgacccggagggtctgtcccaagccgccattatcgacaatctcgatccgctggagtccgctcgtcttagcaagtgtcgtaacattggtattgcggtatatactatcccacttgctccatgtacgctttttgttcttgtctaatgaagtctcgctgcctaggcccatatcgacagcggtaaaaccacctgcacagagcgagttcttttctacactggtcgtatcaaggctatccacgaggtccgcgggcgtgacagcgtcggtgccaagatggactccatggacttggaacgtgagaagggtattaccatccagtccgcggccaccttctgtgactgggttaagaaggataaggagggtgttgaccagaagtatcacctcaacttgattgatactcccggtcacattgatttcaccatcgaggtcgagagagcgctgcgcgttctggacggcgctgtcatgattctgtgtgctgtctcgggtgtccaatcccaaacgattaccgtcgatcgccaaatgcgtcgttacaacgttcctcgtatctcatttgtgaacaagatggaccgtatgggtgctaatcccttcaaggccgttgaccagatcaacactaagctgaagatccctgctgctgctgttcaggtccccatcggtgccgaggacgagttcgagggtgtcgttgatttgatccgcatgaaggctctatacaatgttggcgagagcggagaggagatactggagaaggatgaaattcctgagaaggtcaaagcccttgccgaggagcgccgtaccatgctcatcgagactcttgccgatgtcgacgatgagattgcagagatgttcttggaagaaatcacacccagcgaggatcagatccgagctgctatccgccgagctactattggcttgaagttcacccctgtcttcatgggatctgcgctggccaacaagtcagttcagcccatgctcgacggtgttattgatttcctccccaaccctgctgaggtggagaatctcgctcttgaccagaagcgtgacgaggcgtctgtgaagcttgtcccttataactctcttccctttgttggtctagccttcaaattggaagagagcaacttcggtcaattgacctacatccgcgtctaccagggtactctccgcaagggctccaatgtcttcaacgctcgcaacaacaagaaggtcaaggttcctcgtattgtccgcatgcactccaacgacatggaggaagtcagcgagattggcgctggtgagatctgtgccgtcttcggtattgagtgtgcatctggcgacaccttcactgatggaactctcggctacagcatgacatccatgttcgttcccgagcccgtcatctcgctctcaatcaagcccaagcagagcaaggacggtgccaacttctccaaagccatggcccgcttccagagagaggacccaaccttccgagtttcctatgataacgagagcgaccagaccattatttccggaatgggtgaactccaccttgacatctacgttgagcgtatgcgccgtgagtaccgggtcgattgcgaaactggccagccccaggtcgcctaccgtgagaccatcggcaaccgtgttgagttcgatcacctgctcaagaagcagtccggtggacctggtgaattcgcccgtgttatgggatggatggagcctaccggcgtcctcgaggacaacaagttcgagcagcaggttattggaggcagcatttcggagaagttcctgtacgcttgcgagaagggtttcaacctctcttgtgagaagggtcctctgattggccacaaggttctcggaactcgcatggtcatcaatgacggtgccactcacatgacagattcctccgaaatgtctttcaagaatgccacccagcaggcattccgcaaagctttcgcagaaagccagccttctgtcttggagcctctcatgaagacggtcgtaaccgctccgactgagttccaaggtgatgtcatcggcctgttgaacaagcgcggtgccactatcaacgacaccgaaaccggtgttgacgagttcactgtctacgctgactgcagtctgaacggcatgttcggcttcagtagtaacctgcgcgccgctactcagggcaagggtgaatacaccatggagttcagccactacgagaaggctcctcctcacatgcagtatgtttcaaccccaatcacttctctaaatatattatccgttgctaactgtcttctcttacaggaaggaactcattgctaagtacctgaaggcccaggccgacagacacaagaagtaaacgataaaatatgtaataactcctcacccactccaactactctggcaagccaagctatgcaatgcctagcattggctcttgttggagccaagaagcagcatattttgctttcaatccctgctgcttcttccatccaaaaccccctgtactatttacgcatggcactatatcacattgtgactttctgggacctgtatttcaagatcatgatactactttctactctcctatccgaacaaatagaatttgtgttattttatctctccctcttcggattatttacttataactaggtacttgtgtctttgaacaaggacacccaacgaagtatggaactcttgtccttggttgtttgttgccgaactcaaaagcccctggcctgaggacctcgtactgcttatcatcaatagtagctggggtaatttgcttcagatgctgagccgactcaaagaggtgatggatcttaggcccataagaaaagacccatcacgtgacacatagggatctttccctctcgacacaatccaatcccatcttctgaatcgtgtatcccactctcgtacgcgtcttacggttctattctcaagcttcccaagcacaatcagaatacaggtcctgaattgccgaatcggatcaggccgaccgtggggtctggttttaccgtgctctcggcaattgtgggtcctagactcataccccacggcatgtcagcgaaacgccccagactcgcgtccccggtacggtataatcgcctgccgatcccagaaaccgacatcgatacctcctttccccgttatcagacactatctcccaggcttgtactaagtaagatgaatctcgctttcctatcatgctgtatttagacttgagttgctaacgcgcaacaggaacggattcgcaagtatggggactccccgagtcagcagaaatacgcgctattcacactcttgagactacgccagagaatgaacagctggttcggactcatcatccggcattgcgactacgtgatctagtttacgtatcgcatccccagtacggccctgaggtctggcttgtgaacggcgcgtgcgaagacattgaagcgggggggcgaccgttgcacccttatcctgaggatagacggaacctttacccgtctggaattttgactccacgttcaccatggaaggaggattacctttttaaggaaggtatcaacccaagaaagtttctgtcccctgagaagattgatggcttgcgcgagcttttccccacggcagtaggggcccgtgttttcgtcagtggattcctggtagtccttttcaaatcactccacgacattcaagccatatatgaggaaaactggattatggaagctggtggtttgcgaatactctatgatgaatataggcttgaagctaccgccgataccgttacatccggcatggaagtttgcgacaaacctgagagtctccagggtcaaggctgcttaggcctgagaattcggatgaacgatggaaaagaagctatcacaactgtaacgcatggctttgtgaggaaccctcgacgctcccgtatgacgaagatgttttccgagtggatcctaagagccaagagggctcttctatgcctccggaatccaccacctcaatctgatacttctgctattggagtcgtacggaactccaataaaaattctccgattgggaaagaggtttggttagcaacggagaaaaagagggtaagtctcctccctttttcccgtgcttactgctaataactccaacttattcatatagatcggtaccatctcctacacattcgacgatccaagcccagttcttccgtttccctctggctatcggcacgaccttagcctcattatggacgatgagttacctcagcttatcagcccgcctggttatcccgctgtgtcggaatgggcgtcatactctactgtactcgttgggtccgatgtctacgttgtccgaatgaatacagtcgttgggaggtgggctcttctcgaaggaaccgttggcccgaatgcaattagaaacgcaacggttataggtacccagtacctatgggaccgcactgcgcattcacagactgcatcgcttctatggaaaacgaaggaaccgtttagccctgccgatggatggtcgggatccgttctctgtcttggacggccgacggatgagttgagccaagccgttgtatttcagaatttcgaagtgctctgtaccacgttcgtcgaactcgaacccggtagaactcaagacgtacttgttaaagggggattcttactccctgaatcgatacggtcttctcaaattgtcatcggcaatgacgagcaccggggcaggaattccgatatatatccgcgccgcaggacagaacgcgcagttctagaccgtcgggtattttcggctctctagcaagatttgttctggctttggttcacttgacaattctccggaaattcttactctttactatgttatttttagactgcctcagtgatcacacatttcttacctttgtgaggctttgctctggctttggttcgcttgacgattcccaagaaattcttactctttactgtcatttttagacagtctcagtgataatacatttattacccattgtgaggccttcaaataaactagaatcctagaggagacgttagacggtcaacatacagaatgaaaaaggaagttataggatgttgttggattaggagataaggaagtctattgcagtctgtatgatctccatgcttgctagctgacctccctagatggttggggttattatatcgctctcgtcttctacagcacgaaggaaagtcccacaaacgaattcacccatgaatgatatagaaacttgaatttcttagggtcgggaaattggacattatgattttcgtatgttaggtaccatttctattagtataccatacaaaaggcacctgatttgcgatttattgttgactggggctcactaacacacggtatgtgttttgggcgcctggcacgattattctcttccgctaacgactctatagtatgccttgctacgctcagcaaaatagactcggaactcgtcgactcaaacgtctctagttattcaagcaccacgctctcgggccttgcgcaagtcttcgactccggctttcttctttagttgaggaggggacgggggaatattatagtgccaaggacttcgaataaaaacatgaacagtgtctgagggacgaggagggtgctggttgtcgtcgacgttaacggggggcttcgggcgagctctgctggacgaaagtagacccgtcgtatcctttgtctgttcaatgttagcatgttggcttggtacatagtctgcccatctcactttaatcttcttttctgccttgaaagtcgacacacgtacaaatgagggatttgggcttgaggggcatgaaaggggcgggagggggnnnnnnnnnnnnnnnnnnnnnnnnnnnnnnnnnnnnnnnnnnnnnnnnnnnnnnnnnnnnnnnnnnnnnnnnnnnnnnnnnnnnnnnnnnnnnnnnnnnnnnnnnnnnnnnnnnnnnnnnnnnnnnnnnnnnnnnnnnnnnnnnnnnnnnnnnnnnnnnnnnnnnnnnnnnnnnnnnnnnnnnnnnnnnnnnnnnnnnnnnnnnnnnnnnnnngggagggggagggggaggggggatttatgagcggaaagagccttgtccgtgggtaggattgagagaggcttcttcatggaaacgggaggtaagggcttatcctgtgatgtgtcagtctgcttcgatatatgttcaatctgatcggacccaggctcagataggggaatgtcctcggagtaatcattcttgtggaaattgaagctccgaaacgcctggatgatgggaatatcttccttactcacaccggtgaacaagggaggcaaatattcctctgcatgctggtcgtcgtctcctaacttgtccatgaggtcttcaacctcggggtcgctaagcgcacctatgaagaagggccatctcggatcagcaggcggtgatgtagggatacgaggaagtcccttcgtggcagcaggtcttcctgcagcaccatttccctgaccaactgatggtttcgggtgagcgtcttcggcatagatggtcacattatcccagagcggatcgccttcttcatctcggatttgatagaatgccaacaaacgacgagcaatgtgcagctgggtttccccatctctcaccatcatggtcagtcgataatccagatgaaagtcttgttcgtacaagacagtcacgaggaatgcaccgatcgcgtcacctgggaccttgtccagaatccaggtcctcaagcattttctcaagtaatggattgccttaaggtcccaggaaatgagaaggcgtcgttcttgaacagcaaggacagtatcggccggtctgtcctccaagaatgtctggaagagggcttctagttgccaccggctgctgctagcttccttgtaggagcggcttagactggggttggctggactagatgattcagtggggatcttgttacctgttggagacatttgtggtgtataggatgagtgatatattgtgaggtttgtttctgctgaaaataaatgtcatacagtcaaaatatatgagaaaagtatgaacccaacggacatctccaagtatttatgccttttgggtcctttttatttagtgaaggttcccattgttaagcacagacaagagaaagagaaaacaaagaggtatgcttgtacatcttcaagtgttttgatcaaagaagatattgttctggagtatccagcaagagtaacaaagtcgaacaaagacaagcaaagagctttggtctagaaagttactcattgtcaaccctggttgcttgcagagggattctcatattacgcccatgtcaccttctgggggctgaaagacagccagtggacaaggctcaccatcaaaagaggcgaatgagtattgttcaaattcagatgtattggaacagagatagcacaactgaattatgtacagaaggtgaagacaaaatatcatgggaatcatttgaaacagacgcaacgctccattaaatcatatatgatggattagaaaagaagacagcagccataaacgagctcactggaagggtatatgcacgccaataggggcgatagagttaaaaacagtaatgtaaaaagaaaagtccccaaacgggtagtgggcacggaatcagaacgaagaaggaatatgcagcctgcgatcaaagccacaagacccatcgaataccagtaaagacgccccggaagacaccacgtacaaacttgaaacccatgacaatcagccacacccaccaaagcacagcaacaagagcccattccaaaaccatgaatccagtgcggcggatccaccgcaaccgacggcgacgcttacgaaggcctttatcaagggcatcactcagttgcttgacagcgagtgtgctggtggtgttgagctgaacacataggtcttcggcatcatttgccgtggttcggacgcgaggagtcagggaattgttgactaggtcttccaggttcttcagctggtaccgcaggggatacgaggtggaggtggagaaatgatgcatggactgttggaaagagtgctgggtgtgctcgaaacgctggaggagacattgagcagcgaggtcgaactcgccaattcgcgtcactcgtggaacagatgtgccgggacccaccgagctttgaagccagtgaggaactggctcacggaaggtatgggctcggcgagtgatctcccgggctttgatccccgatgacaatagaagagcccgcgtgcgctcgacttctggtttaccaggtacaccggtgtcaatcaaggtacggatactgcgcccagatatactccaggcgcgactagcacctgaaagtccggggcgtcttccttccggagaaagccctggtgatgctcgagcgttggcaagcccagtgacaggtggccgtgctaagctgaaaggaatggaagagtctttgatctcgtggcgctttgtccgtcccgtgtgtagagaagggctgaaatcaagcgttttgctacgtggcagcgcgaacttcttgggagaatcacgggaaccataattttgtggagaaggaactcgctcgttaggactgccaaaatcggtcgtatctgctgtttcactccgttcatcttgccgcagcggtgatgtgaaggtcggtagggagggtataaagcttcgggatgaattcttctcagaatttccacgggtcaatcgcccaggctcatctgtaaatgttggcaggcgccgtaagagacctttggagccatacttcctgtcactcctagactcttcatcagaaccgctatcatctgatggaaatgtggtggcggatgatgatttccgagattcaggatcttctttcttcaagatgagatctccgaccttggagacttcattgcccacgatctttgttatccgacctggtcccttaaatattcctcgcagctttgattcggggagatggggccctttacgggaccgatggccatctccccgattgccttcctgcgtgccttgatcgtcatgataggatgatgacacaacgtcaggaagaggactcggctcgagcttagaggcaccctccgtcagtgccgtcagatttcgctgacgcaaagtctcgggttccggcaattcatcttcccgctctcgctctcgatctgcttgtttgctcttgctacgctcgtggcgtgaagcaatcttgtggcggagacccttctttgcgggcgagggagatcgacttgaggggggtgacagattgactgctatgctcgggaagtagccaatgcgagcgggagagttgggcgcagtactatccatgccctctagggacacacgaagatcgtgccggtcatcaagactacccgccgatgagaaagagtctttcatgcgcttgcgggcttgcttcttgttgaccgacaatggctcagttggctgtggtgtccttccccgatcaatgtcagcgttacgaacatcggggaatttggcgcgcgatgtccgagatgctgattgtgcgttttcgacgaatctttgaacgtgatcgcggatatgttcacgagacatgcgaggcttctcatcgacggaagggcgggtatctgagcttgaagagctcgagacgctgcccgaacgcattttgccatggtcccatcgtgacggctttcgtttgctcgaagcactacggctgcgtaagctgtgcgaatgacttcgaaatctgtgcctgtgccgcccacgacccacgctcttgaactcttgcgccaatgcagggtgagaactggagagagaagtgcgcggtgacgaatgtccctctccaggatctcgcacttcgaccgaaaggcgcttctgcttagaaggcgtcccgatgtcatcgcctgtgtccatgataactaattctttggggttagggtatagtctacagccatccttgtcgaccaccttcgtcttgttggcaccatattccagccatgcggcatcggccagaagctctgccggtgagatcttccaatcaattcgtggtcgacgggccttcgtgctgctggttcggctgactcgccgcaagctcgaccccggagaggtaggcatcatatccataccttcatgttccccgatagacacatggcggcgatcttgttggaaaggtggcagctttaagcaatctattgggtcatactctctatgactgtatttttgctcgacgttattgatccattgatggactctttcgacgtcgtgccatccttcggcatctgcgtcgatggagcatttctcgcgatacctaacttttcggttgcgaatcatttgaagcgggttataaccacggttggatctatgtggtttagactcagcatcagccgtgactgcatctcgaagaggtggtaatgagggcagtagccgcatatattcatgaaatagatcaaaatgattccgtgctctctcagcacgagccaaagtgctttcggagaattcatatgctctctgatcctcaatcgcggatggaggcaacaaattcacaacagatgattggtctaagctcggcagtgtcccatgtgacagacgcctaccagagacctgggtaaaattgcgatacggcgattcacgctgaaactccctcgctcgtggagaatacgcatagccgttcactgttggaacagtgggttgggagacagatattggtcttcggctctcagggccaaggggtattccagaggctgtcctcctccgagattcattaagattcaaggctagattcacaatctggatcgagtccctatcaaggccaggagttgaatgtgtcacattgtcttcccgtagctcaggctgcgaggggtttccggagggctgtctatcaggagtcgtagaaggttgccaagcactattcgggtttgaacttgagtcatctgggattgatatagatgcatgatgcttatgccggatccatggaaatttcgagcgtttcttgggtaccacaatatccggttctggaacgctgcgcttctcttgagggggttccgaggggcgagggcgatgcaggctaactcttgtgcttcgcggacgaggtaacgagtcaagcaggaaaccccctgagctctgcgttctccgctggctcggtgtcctccgatttccatcacgggaactgctgcccagtgtactaccctccaactccacgctcgcttggccgtcgttctttccggacgaagtctggcgaaatgaacctccatcggatcggagaaaaggcgacgctgtttccgaggatcggtctcgtggtcgtccattcaccggagacattgaagatcgtacagggggctcgttcggttgttgcgacattgctgcaggaagggcaacaatgctagatggcaacgttcgaggaagagacagacattattcggtcagacacaagcatatgtgcaaccagccaaattggcaagggttcaaataccagtgaaattgaagtcaatgttgcacaatcagttgcactatcaggctgcaagttgtagatcggaatgcgcgtcaggccatgttacgtaatcactttattcgcacccgtgggcccgcctaggcacgaaaccgcggaagactcgagtatcagtctgatactatcagacttgttcgtttgatttatgatgagaagatttgtccagatttagagtacatactacaaactgcacaccttatataagtcaagagacataggaaagttctagcatctgggtctaaagcacaagtacaactagaggtacagttcctgtaaaacgaggatatacagggtaaaatgaattcagcttcgctcaaagtatgcgcttactcaacccgcaagcactggaggcgggcctcggcctcgataacctgggagaagaaaagtagttagtggatctgttgcaaattgccaaatcgaaaggtggaacaaaagcttacttcgagagcctgtctaacttcaagaaccttgcgaacatcacccagccagtccttgctgagaattttagcccagccctggagggtgttcatttcccgagcggcggcgtcaacatcgccctgctgcaacaggttctcagtgcgcaccagaacgctctcgacgtcatcaccctcggacaaagcatccttcttgaacatgaccttgcttaggacaaggctggcagcgtgactggcaacaccggcatcctcgggaagcaggctagccttgcggacttcacttgcaacgcggcggaaacgctcgaatatctgagtggtggaggggataccacgctggtaagcagtagggttaatagatgcaatggcagcctcgacgacggcatcaccagcagcaagctctttcacggccacaagctcacgaacgaacggccggggggtctcagcacgctcgaccacggtccgaacggcgtccagtgcgacctgcagctgctgagtcttgagattggtgtcgatcacgtcgctccatccagcggtcagcttctcgagctcgttaatgtcggctgtgagctcagtcaatttgctcagacggccctcacgctcgcgttcgaccaggctctggacctcgtggacatacttgcggttcagctcgatagcttgctcaacgagctcattttgaagacgctgctcagcaagctcctgagcgtggcggagctcagttttaaccttatgctggtatgcctgggcgagcttctcgcgctcggcctcgaactcttcacggaatgaagcgagatcagtggagcgcacttcctcaaattggcgcattaattcacgtgccgagtcatcaaaggtagcatgaagcttgttaagctcctcctgggcggtgttgcgagcctcgctgcggataccagcgatcttctcggcaatcttctccagctcgcccttcgccttggcgacaggagcagagtacttgccggagttttcatcggcgctgatgacagtaacgatgtcgttgaaggtcttaaccagatgctggacaacagcgtcatcaccatcctgcaacttgaccagttcaatagtgctcgcagaaacagcaggttgtctgggctgatccagcgagacggggttcttcgcctccgaatcaggcttcgtgtccttggagctaggcttcgaggcgtcttccttggccttcttgactacggcggtccgatcctcgggcttggcagtcgacttggtttggccgtcgtgagtttccgctgccttcttagaatcgacttcggccttcacttcttcagcaatcttccaagacagaccgctcttgccggggattgtgatgggcttttcctcttctcggggtacggccgggagacggttttggtgtctcaaggcattggggaagcggcggtagaagtcgcgctcctcaaagtagaggacgcattcttcaccgtagggaatgtactcggtaaagaaatcgtggaagttgtcggatttcagggccaggaagatgctgccaccataggcaaagccggatgtgaggatcagataaatcaagaaccgacggaaacgaccggatttgcggggagcagctgccggaggcgagggaggaagcttagattctacagaaatatcgcattaggacataaggggtgggcctcaatggtaattgatgaatgaacgggtcgtcataccttgttcagcggcctgcgagatggtcttgggggggatactggattcagaggaaggggaaaccggtgtcggaccaccggtggaagggggcttagaatcggcgaagaatcgctgcgcatgatgactgtcagtatgaagagataggacggctggggagttctctttacctggcctacaagccggttgcttgcaccggctctagacagccattgcgacgggatccgttggcggacagggtttgacagcaattgccgacccggagcaatcgaggagcgcagcatgacgagccgcacaatcgccaaaattagtggctaaaggtgatcagaaagatggatgggtaggaaaacgggaacttggttgctcagttgcgatccgccccgataatcctgcgggcggtcagggtggctttgcgcgccatttcatgcccacttccgtacatactgacatcacaaaaaatttagctggcttcggagtgcaataaaagataaaacagagattggcctattaatatgggaacctcttttccccggatattggccactggttagatgttcgggaggtcaggtgtaaacaaagaagaaatatattgacacgaacaacacaagtaacaaaaatgaatatcagttgactatacggagtcgacagaactcataaagctatctagtctgcctacactactagtatattgtgtatcttcacagcacatacaggtgaggaaaatgtattatttgagcataacatactaagaattctgaaagaggcaagggtaacgggaatagcaggaattcagcccaagacataggacgaaagaaagaagagcagatgcagacgccaggtgacaaggaacaaggagtacagaaggagcagcacggtcaaagcaccgacagatccagctgcagcatgtctaaagccaaattccatgtggcttcatggaagttaaatccttctgccaaccggggtcatgtgagcccccaattgaagaggctgagcaaggacaaaagaagcaaagaaaaatccgagagagttagattgatcatgaaccgagagtctatccctcggctccgtagcggtagggaatggtgccagagtccgatggaatgacattggcgaaatcatagaaagtcacagagttataccaccgttgaaagatgctgggatgtgtagccttaggccttctcaaacggtgggtgaggcgagggcgcactacccagggggaaatatgatcgagtaactgtttaacaattgcacgcaccagcaccctgagttccgggggcctctggtcgcaagtcaacgccgggccgaggggtcgctcgcaagttccgaggaccggcctgatccagaggtagtttcttggcgatggcggtgaatagttccttgacatttatcgaggacttagcagaggtctcgaagaaaagcaggcccgcttcacgtgcgtaggcctcggcatcagcctcttgaattgctcgcttatcagggctttctgtgacaagatcgagcttgttgcctgctagggcgatcacaatgttctcattcgcttggcgctgaagttccttcacccatgatttggctttgtctagcgacgactatagggtagtttcacgaatgttagcttctatattgcaataaagtcaaaggcgtgatgcaggattgaaccatacagcttgggtgatgtcatagacaaccacagcacagttggcattgcgatagtacatcggagccaacgacttataccgctcctggccagcggtatcccagatttcgaacttgactgtggtgctatcatcgagggagatggtctgtgtcagaaaggcggctccgatcgtcgactcgcgataatcatcgaattggtcctgaaccgaaagattagcattttattactccatgtgcgttcggctcgccgcgggaagtaatgtaatgtggggatcgttgacgactcactttaacgaatctgaggacgagcgaactctggaagatagcggtcaagtcagcggctgataaagaagatcgcaagtgttatcccaaacctttccgacggcggactctcctataaagcatgtcagccatggatcgaaagatgaaaaagaagtacaacatcatcagaacataccaagaaggacgagcttgaactgggcaaatcttgcgcccgggcgggctcctgctgcttgtcgggaagccatgatcaggagagaggagggagcgtctggagggagcgtcgaaggaggaaggaagatgaactgtcgaggaactgagatatatgattcaaggtctcaagacccggatagaagatcgagaaaaatgggagatccaagggtatggagtacaaagatttaaacacttcaaagacctcgtagtttaaggcagacaggaatagatgacggaaggcccagccacaggtgcagcggggcggtgtggctgcgtactgaccagagtggcccgctgttacttttgtaccttccgtcctttttgggaagtcgtagggagacttgaatttattttccctttgatgcttgttcctcttcaaattctcttgtaagacctcatttcaggaggtcactgtttccaactatgtctcctcctattctcccgtttcgggatatcaacctacacgcgtcgccctcccactatgcctttacttcgccatcatcacgccaagcaccaactctggtagtcgaccgaccaaccggtgatttacgtttgaacgatggcccccttccaggtgctaagcgcatctcaagtattgctggaattctcggaattctcaaattgaagcttggtaattgcacttacaaacagaaactcaggaggttgcgctaacgctcacagataaatacatcattgttattaccaaagcccagcccatgggacggttgcgcggccatatggtatacaaagttgctgggaccgaattcctccccatgcgagaacggccgcttcacgacaccgacgaagatgcctatcttacattggtgaaagacttgcttcgaaggggacccatgtacttctcctactcgctagatgtcaccaatagttttcagcgacagtcacaacatgccccagatgttccgatgtggaagggcgcagacgaccgcttcttctggaatcgcttcattcaatccgatctgatcgatttcagcctcggggcaaacgacacaagtggaattcgctacggcccccaaccaggggcagacccttacatcttaccggtaatgttcggtatgatgcgcattactccggcccgagtaaagtcgacatccttcaccttcgcgcttatcacccggcgatgcagacaccgagccggaacgagatacttctctcgcggaattgacgagcaggggaatgttgcaaactacaacgagactgaacagattgtgatcttgaatgactcgacgggtggactatctgggtttggtggaggtcaatcaatgaccagtggcaaagctgggcaagacctccaagtctactcttttgtacaaaccagaggcagtgttcccctgttttggactgaagttaacgacctcaaatatacaccgaagcttcaggttcgtgacgtcgagacttctatcgaagctgcgcgaaagcatttctccgaacagatccgcatatatggagaaaactacatggtcaacctcgtcaaccaaaagggcagggaagagaaggtcaagcgcgcatatgagcagctggttcgcacattagtcacttcctcatctgagagcaccgaggctgatgaacgcacccctgaaaagatgcatgttttggaaccagggttcaagcagaaagagatggatcatttgcattatgtgtactttgatttccacaacgagactaagggcctcaagtggcatcgcgccgagttgctcatgagccgtctgaacgacgggctgacccagggcggttatttccgtggagtggagagtcctggtgcccctggtgggcagttagatactcgttctacgcaaacgagtgtagtccgaacaaactgtatggattgtctggaccgcaccaatgtagtgcaaagcatgctcggccgctgggcagtgacacggcagcttatggatgcgggcgttctccgccctggagagactgccaacgatgaccaggagtttgaagacctgttccggaatatctgggcagacaacgcagatgtggtttccaagacttattccggtactggtgccctgaagaccgacttcactcggactggcaaacgtacgcgagccggcatgttacaagatttgaacaattccatcacacgatatgtacgcaacaatttcctggacggccctagacaagatgggtttgatgtatttttgggtacctatctcccatcggactcaacatttgccaacatccagctattccttgaccagcgaccacttgtcatccagtcagttccatatgttctcgctgctagtgtgttcatggtttcggtagcgcttttcacaagacgattgcctgatgccgctgtctggccgcttcgcctgtttatgaccttctggttgctggtggcggtttactgtttccgcttcgtgcatggacacggcatgctctatgtaagttcttcttatccaggttgaagtattgacccactgacaaattcttttttttaggtcaattggcccaagctaaacacgccgatcgctggcgctgagggatatcaggatgctctcatcaaagcacgctccgatcccatcatcggcaattggcttccttccagacgacaccagcgtggcattagcaatgcccgtctcgtctttttggaagagggcaagactaggattgagtaaatgtttcattcattccggcgttcttgggttatttctttttaccctttattctcatattctgtacacttcatggctgtgtcttctattaccattctgtttaccactacaggcctgccggcagtttcctttctgttcttgccccttcaattcaattcaattctaatcatctttcatctttgttcgatacgctgtttcttgcttgcaataacctgattttccagctctatgctgctaccgtgatttccgaatcggtcccattgttcccgctgctcggattctctcgaaaggttttcgaagagcttagccaatacatgaacactttcaaatacccatatacatcttcaaatttccttatctattgaatgtgagttgttgctcattcttaaacattacaatagatgggaatattgagaataatgagaatagctagaaaggaagttcatcaacgagagggcttttgatttttttgtcttttccaagttcaatcttctacgactagatttctaaaatatatcatgttgggactcaaaaacgtgttcctagatatcaaatatactttcacttattcttgcttataactcatacaaagtgctggaaacatccaatatgcggccttatactatacaaatttatctgtgaatgtagtttataaaataacaaacgaccatgtaactagtcagttagttagttatagtcacttagcttgagttcagtcctatgtatgcgatatgttaggaagcacgtgatcttcccggtcagtatgaaaagggtttcccgaggagagcggggatcaaccagtgaatcataaattgttagagctaccggggtttctttaaccacccctgctcatttgaggactttaggcacgggtttaatttgttcatgcgagggctttgcacctctattcgctcgcaattttgcacaaggcgattttcgacttgttcgcccaccatgactcgaacatatgaggtatgccactccgggctttgcgacaaggaataattatgtcaaagtatagcatatactgattttggaatacataggctgcgattgcatccctcaactcattgcagactaactatgcgattgtggcggcgttcaagaaatctacaacgaggcaacagatcaacgagcaatccctcccggagacagtggagtggttgcggcgcattggatacaaggtgcgctgatggcagggatcttgttccctcattattggagctaatgcgagatatttacgttctctagccttccgatctcaatcggctgaacgcaattcatgtcgccggcacgaaaggcaagggctcgacctccgcattcatctctaccattctctctcaatatagccgaaaagatgcggatcaacctggatccaatcttaagatcggtctctatacctccccacaccttcggttcgcacgtgagcgcataaagatcaacaatgccccattgtccgaagaacagtttgcgcgctatttcttcgaagtgtgggatcgccttgagcactctgctaaattgctgggccaggatcccaccgggcctgggacgaaaccacaatatttccgatacttgaccgtgatggcattccatacctacttgagcgagggcgtggacgccgcggtgatcgaatgtggaatcggtggtcaatatgactgtaccaacgtgatcccacagccgaaggtgacagcgattagcagtcttggaattgatcacgttgatttgcttggacatacgattgaggaaatcgcgtggcacaaggctggcattttcaagcgaggcgtaaatggattcgcggcaccacaacctctggctgcggaacaagttttggctaaacgcgccgaggaggctggtgctcaactggaaatcgtggcttgtcatccagagcttcgtcccgaaagtagcaagatcacccttgggttggctggagacttccagtataccaatgcctcagtggcagtggcagttgccgcggacttcttgcgccaggttgacattgatgttccggacaatatcaagacagaaccactaccggcaaagttcaagaccgggctcgaggaaactcgcctaggtggcaggtgtgaaacccgatttgagaagaatgtctcctggtatatcgatggcggacacactctggagagcatccggctggctggccagtggtttgcgtcgcgtatccaggccgactcatcgtccgaggacgtagccgccagaaagacacggattttgattttcaaccaacagactcgtaacagcacagctcttgctcgtgctctccacgagacccttgcgttcgcccttggaaatgatagcccattctctcatgccctattctgcacgaacattacctacaaacaggcgggcttccgacccgacttggttagtatgaacactaatgctgatgacctcgaactccttcgagtccaaaaatcacttgccgtggagtggaatgctattgaccctcatgcgcaaacacatgtttttggtacaattgaggaggctgttgattttgcgcgggaagttgcgggccaggaacgcaaggtcctgcagaaggatgaagctccggtcatgacttttgtcaccggtagcatccatttagtcggaggattccttgatgtggtcgagacaaaaccacccaccgacgcatgattcccagacgattggtagcctggagctccagagattcttgcattcattgtatcaaccacatgagatatgcttttggcttagtataggacggacatagatgtgtttctacttggatttcaacaattcctcgattttaagcatagtttcatttacaatcgtttaaatgataccatattcgaaagttgtacgtgcttgggatctacatggactttgcatatgtggatgccgaggttcctgatgtaggccattaaacgtttattcgctgagcaggggtcttcactgctcacagtggagcactagtactccctacagaggtgcaacgtatccataaataataattaacaattatttccactactataaataatagcgtgagtgaagcaagttatgtagagttcgtcttaaacttgatcacagtattattaagtcagattgcccgcacgacccccaccagagatccgcggcgtttgaaacgtggggcccaacccaattccttcttccacaacaccccagcgcatcatgtccgactccagcgataagaagggcaaggctcccaagcgcaatgacaatgagtctggcgctccatcagactcaggtaatggtagggctccttccagcctcccacactagaccctagcgcagctgttgacattcaaattctagaagcagggaagaagctccctgcgaagttcgcttccctactcctcgaacaaaacccggccttgaagagcgagctagctgcgatggacaaggaccaagctgcggccctactgcacaacatggacctctcgcagatgctgactggattggcggtgggaggtaagaaccagaaggatatggcctcgtacaagttttggcagacacaaccagtgcctgccttcgaggacgctggaaaaaaggagattgttcaaggacctatcaagatcatcgacccagagaaggtttctaagacccccgatgcgctcgttgagggatttgagtggtgtactcttgacctgacaaatgaggaagagctgaaagagctctacgagcttctcaacaagcattatgtcgaggatgataatgccatgttccgtttcaactactcggaatccttcctccattggtacgattgagtcttgaatatgttacctatctcagaatgttaatgctaaatatatagggccctgatgtctcctggatggaagaaggaatggcatgttggtgtacgcgccaccaagtcgcgcaagctggttgcatccatttgcggtgtcccgactgaactccgcgtccgcggcgagcgcctcaaggtgacggagatcaacttcctgtgtatccacaagaagctccgctccaagcgcttgacccccgttttgatcaaggagattacccgccgttgctacctcaggggcatctaccaggccatctacactggaggtataatcctacccacacccgtcagctcctgccgctactaccaccgttctctggattggttgaagctctacgatgttggcttctcgcctctgcctcatggctcgaccaaggcccgccaggtcactaagaatcatctgcctagccagacgtcgacacctggtctgcggcctatggagtccaaggacattgatgccgtctttgatttgctggagcgatacatgcggcgctttgacctgaaccaggcctttacacgggaagaaattgaccactggcttgtgtacaagaagcagccagggaaagaccaggttgtctggtcatacgttgccgaagacccagaaacccacaagatcactgattttgtctctttctacaatctcgagtctactgtgatcgacaatcccaaccatgattccgtccatgccgcatacctgtactactatgcaaccgagagcgcgttctctaacgacaagcaggctttcaaggagcgcttgcagctcttgatgaacgatgccctaatttgcgcaaagcaggtatgttgcaatgtgctatatctcattctacatgctaatctcgtcttttttattttatttgcttaggcccgtttcgacgtcttcaatgctctcacctcgcacgacaaccccctcttcctcgaggcgctcaagttcggtgctggcgatggccagctccacttctacctttataactatcgtgctgcacctatcggtggtggaattaactcgaaaaacttgcccgatgagtcgaagatgggaggtgtcggaatcgtcatgctgtaggcttgacgctttggctagtaaatctaacgtcggataccccggaaacgaattgcttttccttgtaccgtgctagcgatcaaaagaatatgaaaatcaaacgaacattttatataccaatgttttctggctagacttgtggctggccctagcgaatttcgtgttggcccagacagggaacactgaaagtacttgaggtattacacggctttccccgtttctatacttttaggaagaagctatcggaggaggcaagatctgttgagtacgaagagacttaatctaacgcgaggtctccgagaggagggaggctgagatcgggagtgttctggttactggagataggatatacccatcacatgatctggggtatcacatcaccacgtgataaaactgatggtcatgtggtcctgaggcgctgtcattacgtaattctcgctgatcatttgaagtctcaggcaggcataccatgcctcaggcaaccgactgacgtcgtcgcatggaattcggctccccatgttgacttactactgtttgtcgatgctgtggttttttcatcctgaacattttattcagcaacttttcctttccttcaaactccttgctcgatatcggctcttgagcactgcgacggaacgctgccgtagctagcagtggggtcatccccgcaacaaccatcaacgatgggtgcagcccagtcgaatgagcatggcgcatcatccccaggtaagttctatttgctatatctgtggttagttttatgagacacatgaatgttctactctctcgatcgaccgtaattgtcaataaatgcctcaattttgccatggatatttctccgtcttgtcaacaatagttgtctctgaccacatgcataaacagaagagttgagctacatgcttgctgagcgcttcgccacaaaatgctttacgccattagagctcacacatttcaaagacaacttcttctctcgggccttagagcagggaggcctgcggcactggaatgagaaagtcctttcagacttcttgggtatcccagacggtatctttacctcttcacaggaacaaccgttagatgcagggccggtgatttttcgcatggtttcttatctgggagcctttccattccaaaacacgctcgcgcccagtgtattgacctttgaggccatggttaaggtcgttgtgcttttgacagaccgctacgggaaagcgctgaagcgagggcacaaagaccgaatcaagttactctttggaagcttggctgatgtggggaggaagactcccgccgaggctaatggagaatgtacgaccgaggattccgaagcttcggctgggaattcccatgcgctggggttctctatagataaaccagccaatgatgattacgatgaagatgaggatgatgatctcgcacttgcagcactggactctctcgatgcgattgaagtattcaaacacgatcaccgtgttgacaagaccgtttatgagacccgaatttctatcgatacgttccgccgcttggttatgctactccttgtcattgcacccctgaagccattggattctttgaagatatatacatctggactggatgttcggcgtatggagtcggttaagaacgaggcagacagtattattgcggccttttcaccggaagagagtgatggggggatatcttacaagtcttttgcccggacgatatcactgtctcttccatatctattcgacccgctgactgcccttttcgagcacctgcttttcagcaaaaatctgaacctatctcaacgccgccataaaggtctagctacggagaccgaacccgaggagagcgaggagaacgaagaacctcccctacaacccgctgcacttacacttccgggaagtttcgaatcggccatattaaatccgacagttaattcgcatctttcgttcttcctcccatctatctcacccgatatcaatatcctccgaggtggcgtcaaactacatcccgtcttctctacaaacgcccacgggtcttccttaacatatttctcccaccacgtcctcacctggcaatctgccactctcctcatcctgcaaggggctctagtagattcaagcagtgaagagttgataacactaggggcctacattccccaaacgtggaaaaccgcctcatcgacctcaggctcatcttcaaaaacatctgacatcctcccctgtctctttcaactatccccaaagcacctcctcctcccgggaaacccctccccatccgcaaagaagcccaacaccccaatcgcctacttctcacccaacaccggcatcgcaatcggctgccaaatccccgctccgtcccgcacgcaccaaacctacccgaccccgcatggagcaggcagcctcataatcgacgcgaacatcgaaacggccgagttccacgccgcacccattggacacgacggcgccttcttacccgctagtaatacatcgcccgaagacccgcccacaaagatcaagcttgatctgtataccctggagatttggggcatcgttccagacccagaggcgtcatcatccgcagagacgaacttgggtcccgtggagattcagcgtgcaaagtgggaatttgaggcacgggaggctgagcgtcgtcgtaatatcaatatcaaggctggagctggggattcggcggccgagagtgcgaggtggcttttggaggcggctggtattattggagatgagtctagatattctggtgggaggggttagggtggtgggctgtgccgagcaagcacgtctgtttgaatgtcctacgtggtataacttctgcggcttggtgtccttggtgttgagattcgttatcggaatcctataataaatacctgccctaccagcctgaatttttcctactcaaatctcatcgcattttcagcagaatcttgctataccatccagtcgctgtcttctaaacatatgtagttcaggggcattgtattactttcgcaaaacgtgggtctgagagatgacaagtagtacatctctaaacgcaagatcttgaacattccatcgttgtacatttaagaaactgtcacacgtaaaaccttacacaaccttgggaagtacaagcatcattcgagtgccaccttcggtttagagtttcacataaatccgatctgtttcgaagggacccttcgatgaacctaacatcatgctttcaatggcggtaacccgcttggcgcatcatagaaatctttcagatcttcttcatcctcctcgaattcgaagccagaattctccccctccgattcgtcgccagcgagctgaacacgggaaagacgactgcgggttccggaaccgagattgcccgaagaagcaggtgttccgtccctttggaaggattctgagggtacctcgcgaggtagccgcatagctaggtacccatccggcgcacgttcggcgcgatccatgatatcattcatatatttgcgcacctcgtcggctggcttgacgactcgcgctagaggctcgaggattttggcattaggggcgtgaatgcggaacgttactggttgccagtattccttaaaatttgcctcattggcaggagtccctgggagcccgggggttaggatgcctgtttgatcggtgggttcctgcttttgtggtgttcccgttgtgggtgtgcatggctggctgggcgctgggctatcggttggtagtttgtccttgtctattttgactttcggttcactcttcttagctttcgatgcccctttgcctttgcttttggagttggcagcttctgtggcggtttcgagagggaaggttgtatttggaggaactttccggactaccaaaaacgaggcgatgactgtgttttcagctgggagccattccagaatggtatactcaggaaaaagatagcggtcacccgaaccggcatgacctgaagtactacttccgtatggagtcaagggagaagtgaattcaaacacgacagacttgtagtttatcggtggagatccaagtggagatacgtaagagattgaagccgggcgggggaatggaacaggcgtagtaaattggggtggtcgagactgaagtggaggttgtgacccataagaaggttgctggtggggggcatatggtggtccgggtcgtgctcctggctgctgagcgctggctggtggtgtcgggtttaccacgggagtctgctgctgcgtagtagaagcagtggctggggtgcttacagcaccaggaatcgctgatggggtcggaaccactgggcgcgctgcttcggacggcgcagactgggaggtgctgtgttctgtggctggttgctcttccttggcagcggtcgacccggtggcactctggggaggcttaggagcctggcttggtggatcttgcgcaggggtcggaggctgcgtctccgtcttcagaggtggctgcttcggacctttggatggggtctgcgatgtttgtggggatttctctagcgatactgacttcgtcccaccatgttgttgtttctgggtctgggtctggggttgtggagtgggggttgactgttgcgtaatgggttgtcctgctgaagattgctgccggtgttcttgctgctctcttgatttgatgattgcattgagttcgtcgatatgtgcttggaaagcccggagttgctcctgagatgcttggcttgacgcaacaacacgcatcaaggccttaagttcagggtcagcagctgcccttgtggctagcatttggatcacaggatctggactgggcttggctggctggctcttttgcccatgtggcggcttttgtcctccttgaggagagggtgcgttcgggccacgagcttgttggggcgaagggtggctgcctgtatacccagggcgacctggaggagcgggagaatattgcgcaggtcgttgttgattggatgacgtgggatacggtcggtattgttggaagttattagggtggccgtagtgaaccatcggtcgttgcgggggtgcgtattgcaatgccggcggcgcactgggatctttgacaatgtaaatcgtagcatcaaagaaatggggaccgatggtgacatcgcagggcccgatttttgccatagtgtcctttgacgggttgttcttctcgatctgctcgcgcttcgtcttcttcggctttgtgtagtatcgaacaagaatgccatcgctcagccactttttcttcgatcgttcgagtgaagcgaggagaaccgcactgttgagataagacagaataatgtcagtcatgcaacaccgatgggggccgcgatcgcaaacctttcggcgattgattggtactcattgtccgacaaggatagtgcctgtcgcgtgcggacaataggcaaaggatctccatccttaacctttgttggtaaaggagcgtcaactaattcgggggatggggcgcgaggagttggcgcctttttcttgtgagactgcggcgtggcttcggagacacgtcttttggctgcagattcgcggcggtcacgcgcggggagcttgcgcttttcagccatggagaattcaatgatataatcacgatacccacgatggaagtataacaaacattctataacggaagtttggatggagagaggatggaagggagaaatgagagagacgcgataacgcgccgcttatcgccgcctccgccaagattgtccgctcacctccgttggtggttgccaacagagattaatcaactcaaccccaaaacgcataatggttgagcttaagcctatttttaggaaggcttactggtcccttgcagcaggtggcctgctatacgtgctgtgtatcctctccttgaccttcccagaggttcaacgttcgtatgtatctagttccccccgggcctacctccagagtgagctaatatagataacacagtgttctttatgccaacaagatcaatcccagcttgtggcaggatgtcaaccaagtcgaacagtttggatttttaagtatggcatccctaggggaacaacggaagtatgtttgctaaccgatccccaaaggaacccaagtccaaccgtttcatttggttacgcccgacaatgaaaccatttacggctggcatttgatgcccttgcatctttgcctggagttcgaaaaggaattaatggagaatccctctacgggcccagcggaggactacacgaagacagttgcctacaagcttctcgccaatgaccccaatgcacgagttgtggttagctgtaagtgatagacaacctagattccgactgcaaaaaactgacaggcaagtccacggaaatgcggcgcatttgggttccgctcaacgccctgccacttacaactcgatgctaagcctatctaccccatcaaacccagtccacgtctttgcaattgactatcgcggctttggtgttagcactggaaatcccaccgaggaaggccttatcacggatggtgtgtccctcattaacttccttaccgcagggccattagaggttcccacctcccgcatcgtcatcgtgggccaaagtcttggaactgcagtaacaactgcagtggcagagcgttttgcattcggatcatctgacccagcagctatccaaccggctatcaagaacgccgatccatttgctggcgtggtcctattggcatctttcagcagcctagccaatctcatcgagtcctacagcttcaaaggcctcaccccgcctatgctctctcctatcatgggatatcctcgatctcaacagtggctgttgagccacattgtggaccactgggacacggctgggagactggcgcgtctcaccggcgttaatactacttccttgaacgctgtagatatgggctacattgataaaagccttgatctcacgatagttcatgcttttgatgatgctgaaattccctggtatgaaggacgccgcgtttgggaggctgcgacgggcagacatgtcaagggtgctcctggtgctatgacgtatctcaaatccgaggatggcaaccctagcgaggtcaagatctggaagaatgagatcagcaatgaagatggtagtgaggttgtcaaaacagtcagatgggaacggattcgatacggtggtatgttgaagcaacaccctctggctataaattcgacagactgaccataatcttttaggtcacaatcgcgttgcatcaggctcagtggctggtatcgctgttatgagggcttttgagcagtaatcggccgacatattgataatccctataaagcctcgggaaatacataaactcactgatcctagccagcgtaagggtcacggatggacagcgtaacgatctcaataaatgataaagtgcatgtctttcgttaattacacatagaatatgaggacctgtgggattgacgccgaaaatgaccgcttttgaggccagaaacggctgcctttccacccgtaactttggatgtccagccccttgaccgcccactgccctataataccactattctgcacccgcccagtagcgttagtcatcctccggtcctgatgttgacgctcgacttatacggtttttcccctcgtttctactggcaaccaaaacgacgccgaaaatggctccctttcagctgaattcaagtcccctcccttttcgcccagtctatttaagcgcctataatatacttcgccttccctcccctccggtatccttatacctctcattctcttatcctcgttacctatacctcgagacaacctcgactttatcgtttcctataatataaatttcctaccctagtctttgttctattcttctctatagtacctacgcctatatatccggcttaaaccgatgagtactaatactagaccgatcctattctttataaggaaacttaagtaagactagaatatttttgtagtattagatagctccctctaaactttaagctaaagaccttagaaggtatcgctattatcgaatattattagcgaaagtaagtacttacttagttaggaaaagtcttataactaagactaatataggaatagatattatattcaattaaatgaggattatatagactttctccttttagaggatctaataatctatataaacttttttgattagatatttaaaatattataaaagaaactgctttagttatataataaatactagcgatacctttattaatactttaagctattcgcctattactgtattagtaagaatacctattaatagatataacgagtaggttatatcctatctattcctaatagagtgtacttaccttagaaaagtttctcgaaggtatattcctagccgagcgtaaaattccccgataaataaaggacaaaaatattctagatatagatacttttaatatgatttaccggtattactaggtctattcgagattcttttatcacaggagtataattatttagtttactatagtctagctctagtccgctattataagtacacaacctagtatcttacttccttaagacagcttattacctagtaatctagttttaggtaaacgtaaatgggataacagcttctagagtgatcttctaaagtacatttccttaaaagatcttctagacttagtctactattgtaatatcgaacttttctatttaaaagacctttaaagtaaacataatatcctctgtactattatcgagttttataatcttaaaggttaactagaaggcgctaataggtaagctagaattttaggttagatttcttataaactaaccttaatactaatccttactaatagaactaaattctttatatatagcgattattaactagtatattacctaatagcacagatcattatatttactttccgcgatagagcttttactaatactaaccttatactaaagcttatttagtagctataagttctaagaggtagtttatctctttccctctaatagaagcctaaggttcttaatatacctctcctttaatatcttagatatactctatatagctatagacttaataggtctttactaataacctataattcaagctagcaggcgcttaaggagttaggttaagatactagatttaaagataatattaggtattacaatttttgctactagatagtaaataaagtcaatagtatatcacttactaaatataatataatagattcattttcgctataatagataggatctcttacaatagagctaactatctacttacagaaaattttactaaccaggagtaataaagggtacttaggtagtctagtaatataatatttaaaaagtattactaatcacaatttattatatataaccttcagtatattattcttcttcagctctcctaagaaggtctagtacactttactaagagtatacttaagaagagagatttattagtactatctaatcttaccgaaacttataaatatactatttactaaaaccctaaaattctataactaagatataagaaaagagagcttatagtagagatataatctatagctagtataattaagaatacctataatacctttctatacctcttccaaaggtataagaccattaaaaaagacctagctaaactttagaaatcattagtaatcgaaactcataagatagctagaaaggactattttaataatatccctatacttaaagttaactgatagattaagtaaatacttcttagtaaatctaatattaaggaatataatactaatagttctactaaagaaaactaggagctccctatcctagactatatatttcctaaacgagcttagcttatagagaacttttatagtcctaatgcagaagacttttataaagataaattacttacttaatatatctaggttactaaggacatagttacacttctactactttataagccaagtaagtaaggcaactatattaattagattcttaataaagaggaaaatatacctattaaatagcctaagtaactagtacctaataataatagataaatatatctaatagatatttgtattatctactttagtaaatcttatcgcttagtatctaaccctcctctacataaatttccttctaagtaaccagactcacttcatcgttatcttatcgactcttatctactttatatatataataggattagctataactaggaagtatactgtattcttcctaagtttactaaaatcaccgaatttttagcctatactaataaagaatataaatataatattaatattaaactatattatcttaccgaaaggctataggttagctatagtaatagttcttccagagaaatatctatagaatcagagaatcagtaaggcaccgaaacccccgcctcctctatcaattttaatataataaatattaatcctcaattaataagacccagccctattactatcgcgaagctattagcctacctatctaaaaccaatatttctacctccccttccctaataataaccactaacttaaattcagcagagatttctatacagcaagtaataaggggaatagtaaaggcagtaaatttagaacctagccctaagctagaatctttatcacagtatataacacgcttatcttaaaaaagtaggcacctaaaagagcagcctaaggggcagcagagggataaaggacaaccaggtaaaataaaggtatctactatcaaatatatactatatcgattaaagcgattataagctcagtgatttatataaccttagggataattcgttttatttatatatttagatatagtttaagagattaatagtagaccttatcttagaagtatttctagcttagtaatatataagttctagactatagtttacttcaaatagctataaagagtaacttatattctaatagtatttaaagattatattacagaataatagtatggtaattaggttaagttaggttatatagtaacaatagccttaggtccttttataaagctcttccttacctattcctagcgtttagggtagaaaagaataacttccatccctcctagaaggaatatatatataagaggctacctaccttcttttctcttttaatagttaaactagtcttatctttaatatataccggagttagataggtcacatttccctagttaaaggctctaatatcataaatactaagagagtataaggatatagcgttaaatcgtagaaagctctatataaaggccagctctatatatatagagcataataataacttgtatatatttagacttatataacgcagtagttacaaagctatatcacttttgataagctataggtatagggtatatctaaccagcttagtaagaggagttattagagagtcctaatcgaagcttagctatagagaatcattagaaggtttaagatatataagctaaataacctttaaagttaggttatagcccttaagagtagctagtaatagctagatataatacttataagacctcggttatattatatcaaacatctagtagtaatccctctcctaatcctcgtggccctttatattataaaatactaaaaccaattcttttaagttaaagaggagattaaaagtaagttttattaaagttaaatctctccctacttctataatctcttattacttagtatatatccgttatatcatcttataaatatatatatataaagggtgatcgcctaaaaggtattctattttatcctaatcctcactaccttctatatcatcgtagcctttacatatatcgatataattattaggggtaaggatttctattttaaaaatattatactcttatatttctagctaaacgtcagtcttttctatatataattagcttatagatccttaccaggattaagcaacattggggcaatatattcaaaggaaacaatatactaacgtaagcttaattttaaaatactttctaataggtcaaatctattattcaagaatttaatactaattttatgaaatagaacaggtaagcagacatcccttattcagcagctaataagtgaaagctatttgatttattaattatcaagacaattaacgatattaaagaggatttcggtagacagcagctctattctaattagttaatagacttaacggttctagaatctctctagaaagtgataccagaggatataaaagagctagattctacgcctttatataggtaaggctagatatatcgagtcgatgattagcttctaaggagataactaaacataatattcttaatcgcaataacgaaaccaaaatagatactatatactcacagtacgtcccaccgaagagccccggccacatagaagggaaaacgtcatataaactagctcttagtactacttctctccttatccaatcattctaggcataacccagacttagaatagtctagaggtaactaggaaatacgcacaatggttcttatctaatacctaccctgtcccagtaagggctagtgttattggcttattagctaaagggtgggcccctgcagtagccttcgattcagtggtagtctacacccctctagcagctgctttctttttagcagtctactaattaattgccaaactttaaagcagtcacagtgatacgatcatggtcagaatgatatataatcgcttagacattctatatctgagggccttcttctaaaacatatatatccctacctagccatcctttaatattaggcttaccttacttcagcgtaatactatgttactaatctttccttatactacctcccttgataagaattactctataatatataggagtaccccttctatctatatacatataacagataaaggtctgtataagagggaaatacatataaacctgcataggcttaggaaggaatatctatattattatatatctgtttcgatatcgatctataaggggttcgttatataaatataggtagatagatttccttatagtttaggacccccnnnnnnnnnnnnnnnnnnnnnnnnnnnnnnnnnnnnnnnnnnnnnnnnnnnnnnnnnnnnnnnnnnnnnnnnnnnnnnnnnnnnnnnnnnnnnnnnnnnnnnnnnnnnnnnnnnnnnnnnnnnnnnnnnnnnnnnnnnnnnnnnnnnnnnnnnnnnnnnnnnnnnnnnnnnnnnnnnnnnnnnnnnnnnnnnnnnnnnnnnnnnnnnnnnnnnnnnnnnnnnnnnnnnnnnnnnnnnnnnnnnnnnnnnnnnnnnnnnnnnnnnnnnnnnnnnnnnnnnnnnnnnnnnnnnnnnnnnnnnnnnnnnnnnnnnnnnnnnnnnnnnnnnnnnnnnnnnnnnnnnnnnnnnnnnnnnnnnnnnnnnnnnnnnnnnnnnnnnnnnnnnnnnnnnnnnnnnnnnnnnnnnnnnnnnnnnnnnnnnnnnnnnnnnnnnnnnnnnnnnnnnnnnnnnnnnnnnnnnnnnnnnnnnnnnnnnnnnnnnnnnnnnnnnnnnnnnnnnnnnnnnnnnnnnnnnnnnnnnnnnnnnnnnnnnnnnnnnnnnnnnnnnnnnnnnnnnnnnnnnnnnnnnnnnnnnnnnnnnnnnnnnnnnnnnnnnnnnnnnnnnnnnnnnnnnnnnnnnnnnnnnnnnnnnnnnnnnnnnnnnnnnnnnnnnnnnnnnnnnnnnnnnnnnnnnnnnnnnnnnnnnnnnnnnnnnnnnnnnnnnnnnnnnnnnnnnnnnnnnnnnnnnnnnnnnnnnnnnnnnnnnnnnnnnnnnnnnnnnnnnnnnnnnnnnnnnnnnnnnnnnnnnnnnnnnnnnnnnnnnnnnnnnnnnnnnnnnnnnnnnnnnnnnnnnnnnnnnnnnnnnnnnnnnnnnnnnnnnnnnnnnnnnnnnnnnnnnnnnnnnnnnnnnnnnnnnnnnnnnnnnnnnnnnnnnnnnnnnnnnnnnnnnnnnnnnnnnnnnnnnnnnnnnnnnnnnnnnnnnnnnnnnnnnnnnnnnnnnnnnnnnnnnnnnnnnnnnnnnnnnnnnnnnnnnnnnnnnnnnnnnnnnnnnnnnnnnnnnnnnnnnnnnnnnnnnnnnnnnnnnnnnnnnnnnnnnnnnnnnnnnnnnnnnnnnnnnnnnnnnnnnnnnnnnnnnnnnnnnnnnnnnnnnnnnnnnnnnnnnnnnnnnnnnnnnnnnnnnnnnnnnnnnnnnnnnnnnnnnnnnnnnnnnnnnnnnnnnnnnnnnnnnnnnnnnnnnnnnnnnnnnnnnnnnnnnnnnnnnnnnnnnnnnnnnnnnnnnnnnnnnnnnnnnnnnnnnnnnnnnnnnnnnnnnnnnnnnnnnnnnnnnnnnnnnnnnnnnnnnnnnnnnnnnnnnnnnnnnnnnnnnnnnnnnnnnnnnnnnnnnnnnnnnnnnnnnnnnnnnnnnnnnnnnnnnnnnnnnnnnnnnnnnnnnnnnnnnnnnnnnnnnnnnnnnnnnnnnnnnnnnnnnnnnnnnnnnnnnnnnnnnnnnnnnnnnnnnnnnnnnnnnnnnnnnnnnnnnnnnnnnnnnnnnnnnnnnnnnnnnnnnnnnnnnnnnnnnnnnnnnnnnnnnnnnnnnnnnnnnnnnnnnnnnnnnnnnnnnnnnnnnnnnnnnnnnnnnnnnnnnnnnnnnnnnnnnnnnnnnnnnnnnnnnnnnnnnnnnnnnnnnnnnnnnnnnnnnnnnnnnnnnnnnnnnnnnnnnnnnnnnnnnnnnnnnnnnnnnnnnnnnnnnnnnnnnnnnnnnnnnnnnnnnnnnnnnnnnnnnnnnnnnnnnnnnnnnnnnnnnnnnnnnnnnnnnnnnnnnnnnnnnnnnnnnnnnnnnnnnnnnnnnnnnnnnnnnnnnnnnnnnnnnnnnnnnnnnnnnnnnnnnnnnnnnnnnnnnnnnnnnnnnnnnnnnnnnnnnnnnnnnnnnnnnnnnnnnnnnnnnnnnnnnnnnnnnnnnnnnnnnnnnnnnnnnnnnnnnnnnnnnnnnnnnnnnnnnnnnnnnnnnnnnnnnnnnnnnnnnnnnnnnnnnnnnnnnnnnnnnnnnnnnnnnnnnnnnnnnnnnnnnnnnnnnnnnnnnnnnnnnnnnnnnnnnnnnnnnnnnnnnnnnnnnnnnnnnnnnnnnnnnnnnnnnnnnnnnnnnnnnnnnnnnnnnnnnnnnnnnnnnnnnnnnnnnnnnnnnnnnnnnnnnnnnnnnnnnnnnnnnnnnnnnnnnnnnnnnnnnnnnnnnnnnnnnnnnnnnnnnnnnnnnnnnnnnnnnnnnnnnnnnnnnnnnnnnnnnnnnnnnnnnnnnnnnnnnnnnnnnnnnnnnnnnnnnnnnnnnnnnnnnnnnnnnnnnnnnnnnnnnnnnnnnnnnnnnnnnnnnnnnnnnnnnnnnnnnnnnnnnnnnnnnnnnnnnnnnnnnnnnnnnnnnnnnnnnnnnnnnnnnnnnnnnnnnnnnnnnnnnnnnnnnnnnnnnnnnnnnnnnnnnnnnnnnnnnnnnnnnnnnnnnnnnnnnnnnnnnnnnnnnnnnnnnnnnnnnnnnnnnnnnnnnnnnnnnnnnnnnnnnnnnnnnnnnnnnnnnnnnnnnnnnnnnnnnnnnnnnnnnnnnnnnnnnnnnnnnnnnnnnnnnnnnnnnnnnnnnnnnnnnnnnnnnnnnnnnnnnnnnnnnnnnnnnnnnnnnnnnnnnnnnnnnnnnnnnnnnnnnnnnnnnnnnnnnnnnnnnnnnnnnnnnnnnnnnnnnnnnnnnnnnnnnnnnnnnnnnnnnnnnnnnnnnnnnnnnnnnnnnnnnnnnnnnnnnnnnnnnnnnnnnnnnnnnnnnnnnnnnnnnnnnnnnnnnnnnnnnnnnnnnnnnnnnnnnnnnnnnnnnnnnnnnnnnnnnnnnnnnnnnnnnnnnnnnnnnnnnnnnnnnnnnnnnnnnnnnnnnnnnnnnnnnnnnnnnnnnnnnnnnnnnnnnnnnnnnnnnnnnnnnnnnnnnnnnnnnnnnnnnnnnnnnnnnnnnnnnnnnnnnnnnnnnnnnnnnnnnnnnnnnnnnnnnnnnnnnnnnnnnnnnnnnnnnnnnnnnnnnnnnnnnnnnnnnnnnnnnnnnnnnnnnnnnnnnnnnnnnnnnnnnnnnnnnnnnnnnnnnnnnnnnnnnnnnnnnnnnnnnnnnnnnnnnnnnnnnnnnnnnnnnnnnnnnnnnnnnnnnnnnnnnnnnnnnnnnnnnnnnnnnnnnnnnnnnnnnnnnnnnnnnnnnnnnnnnnnnnnnnnnnnnnnnnnnnnnnnnnnnnnnnnnnnnnnnnnnnnnnnnnnnnnnnnnnnnnnnnnnnnnnnnnnnnnnnnnnnnnnnnnnnnnnnnnnnnnnnnnnnnnnnnnnnnnnnnnnnnnnnnnnnnnnnnnnnnnnnnnnnnnnnnnnnnnnnnnnnnnnnnnnnnnnnnnnnnnnnnnnnnnnnnnnnnnnnnnnnnnnnnnnnnnnnnnnnnnnnnnnnnnnnnnnnnnnnnnnnnnnnnnnnnnnnnnnnnnnnnnnnnnnnnnnnnnnnnnnnnnnnnnnnnnnnnnnnnnnnnnnnnnnnnnnnnnnnnnnnnnnnnnnnnnnnnnnnnnnnnnnnnnnnnnnnnnnnnnnnnnnnnnnnnnnnnnnnnnnnnnnnnnnnnnnnnnnnnnnnnnnnnnnnnnnnnnnnnnnnnnnnnnnnnnnnnnnnnnnnnnnnnnnnnnnnnnnnnnnnnnnnnnnnnnnnnnnnnnnnnnnnnnnnnnnnnnnnnnnnnnnnnnnnnnnnnnnnnnnnnnnnnnnnnnnnnnnnnnnnnnnnnnnnnnnnnnnnnnnnnnnnnnnnnnnnnnnnnnnnnnnnnnnnnnnnnnnnnnnnnnnnnnnnnnnnnnnnnnnnnnnnnnnnnnnnnnnnnnnnnnnnnnnnnnnnnnnnnnnnnnnnnnnnnnnnnnnnnnnnnnnnnnnnnnnnnnnnnnnnnnnnnnnnnnnnnnnnnnnnnnnnnnnnnnnnnnnnnnnnnnnnnnnnnnnnnnnnnnnnnnnnnnnnnnnnnnnnnnnnnnnnnnnnnnnnnnnnnnnnnnnnnnnnnnnnnnnnnnnnnnnnnnnnnnnnnnnnnnnnnnnnnnnnnnnnnnnnnnnnnnnnnnnnnnnnnnnnnnnnnnnnnnnnnnnnnnnnnnnnnnnnnnnnnnnnnnnnnnnnnnnnnnnnnnnnnnnnnnnnnnnnnnnnnnnnnnnnnnnnnnnnnnnnnnnnnnnnnnnnnnnnnnnnnnnnnnnnnnnnnnnnnnnnnnnnnnnnnnnnnnnnnnnnnnnnnnnnnnnnnnnnnnnnnnnnnnnnnnnnnnnnnnnnnnnnnnnnnnnnnnnnnnnnnnnnnnnnnnnnnnnnnnnnnnnnnnnnnnnnnnnnnnnnnnnnnnnnnnnnnnnnnnnnnnnnnnnnnnnnnnnnnnnnnnnnnnnnnnnnnnnnnnnnnnnnnnnnnnnnnnnnnnnnnnnnnnnnnnnnnnnnnnnnnnnnnnnnnnnnnnnnnnnnnnnnnnnnnnnnnnnnnnnnnnnnnnnnnnnnnnnnnnnnnnnnnnnnnnnnnnnnnnnnnnnnnnnnnnnnnnnnnnnnnnnnnnnnnnnnnnnnnnnnnnnnnnnnnnnnnnnnnnnnnnnnnnnnnnnnnnnnnnnnnnnnnnnnnnnnnnnnnnnnnnnnnnnnnnnnnnnnnnnnnnnnnnnnnnnnnnnnnnnnnnnnnnnnnnnnnnnnnnnnnnnnnnnnnnnnnnnnnnnnnnnnnnnnnnnnnnnnnnnnnnnnnnnnnnnnnnnnnnnnnnnnnnnnnnnnnnnnnnnnnnnnnnnnnnnnnnnnnnnnnnnnnnnnnnnnnnnnnnnnnnnnnnnnnnnnnnnnnnnnnnnnnnnnnnnnnnnnnnnnnnnnnnnnnnnnnnnnnnnnnnnnnnnnnnnnnnnnnnnnnnnnnnnnnnnnnnnnnnnnnnnnnnnnnnnnnnnnnnnnnnnnnnnnnnnnnnnnnnnnnnnnnnnnnnnnnnnnnnnnnnnnnnnnnnnnnnnnnnnnnnnnnnnnnnnnnnnnnnnnnnnnnnnnnnnnnnnnnnnnnnnnnnnnnnnnnnnnnnnnnnnnnnnnnnnnnnnnnnnnnnnnnnnnnnnnnnnnnnnnnnnnnnnnnnnnnnnnnnnnnnnnnnnnnnnnnnnnnnnnnnnnnnnnnnnnnnnnnnnnnnnnnnnnnnnnnnnnnnnnnnnnnnnnnnnnnnnnnnnnnnnnnnnnnnnnnnnnnnnnnnnnnnnnnnnnnnnnnnnnnnnnnnnnnnnnnnnnnnnnnnnnnnnnnnnnnnnnnnnnnnnnnnnnnnnnnnnnnnnnnnnnnnnnnnnnnnnnnnnnnnnnnnnnnnnnnnnnnnnnnnnnnnnnnnnnnnnnnnnnnnnnnnnnnnnnnnnnnnnnnnnnnnnnnnnnnnnnnnnnnnnnnnnnnnnnnnnnnnnnnnnnnnnnnnnnnnnnnnnnnnnnnnnnnnnnnnnnnnnnnnnnnnnnnnnnnnnnnnnnnnnnnnnnnnnnnnnnnnnnnnnnnnnnnnnnnnnnnnnnnnnnnnnnnnnnnnnnnnnnnnnnnnnnnnnnnnnnnnnnnnnnnnnnnnnnnnnnnnnnnnnnnnnnnnnnnnnnnnnnnnnnnnnnnnnnnnnnnnnnnnnnnnnnnnnnnnnnnnnnnnnnnnnnnnnnnnnnnnnnnnnnnnnnnnnnnnnnnnnnnnnnnnnnnnnnnnnnnnnnnnnnnnnnnnnnnnnnnnnnnnnnnnnnnnnnnnnnnnnnnnnnnnnnnnnnnnnnnnnnnnnnnnnnnnnnnnnnnnnnnnnnnnnnnnnnnnnnnnnnnnnnnnnnnnnnnnnnnnnnnnnnnnnnnnnnnnnnnnnnnnnnnnnnnnnnnnnnnnnnnnnnnnnnnnnnnnnnnnnnnnnnnnnnnnnnnnnnnnnnnnnnnnnnnnnnnnnnnnnnnnnnnnnnnnnnnnnnnnnnnnnnnnnnnnnnnnnnnnnnnnnnnnnnnnnnnnnnnnnnnnnnnnnnnnnnnnnnnnnnnnnnnnnnnnnnnnnnnnnnnnnnnnnnnnnnnnnnnnnnnnnnnnnnnnnnnnnnnnnnnnnnnnnnnnnnnnnnnnnnnnnnnnnnnnnnnnnnnnnnnnnnnnnnnnnnnnnnnnnnnnnnnnnnnnnnnnnnnnnnnnnnnnnnnnnnnnnnnnnnnnnnnnnnnnnnnnnnnnnnnnnnnnnnnnnnnnnnnnnnnnnnnnnnnnnnnnnnnnnnnnnnnnnnnnnnnnnnnnnnnnnnnnnnnnnnnnnnnnnnnnnnnnnnnnnnnnnnnnnnnnnnnnnnnnnnnnnnnnnnnnnnnnnnnnnnnnnnnnnnnnnnnccctaggggcccctccgagactagtaagaattagtcttagtatactattaatatattgtgttccctctataaagccctttatatcttacctggttgataggccgtatacccgcataacgtatacctttacagacttactttagtaaattatcgatagatttagaggccgatctttctatagatacaacttacgcctactatctcttagccacatttattcctcctagtaagccagagactttcgcttactttagaatggagcctgaagcctaccttagtctatacattaaaggcagggttatagtatagatatagactgactaaaagaagattattaatacccttacttaccctagactagctattaagggaattgcagctattgggcctaccttagatatttacggctaggtgatttccctagggaatcgatttattacagttctaatactaagatcaaatccagattcgcggtaagatcatactcttcggcttacttaatataggagcaaagatgtctttcagaaaggctgaagtcttttagccttaggacaataacttataagacaaatatttaaacctacttagccttaagagtaagactaaatctccggctccaggtacagttaaaccagtattccacgctagagtcgccgtcgatacacagattaatgttcttatcaccctataagccagtattagtatcaagattagtggcagcaagattattaccggcaagaccttgatagatacttagctaagtagctatataaacactgacctctccttctaggcttatagtaactacgatacgtctaataataccttctactactaatttagggcctatctgtactataatatttgtcagaatctaggatgaatactgtcatttttcatccctgatacagttggatcacgtgactnnnnnnnnnnnnnnnnnnnnnnnnnnnnnnnnnnnnnnnnnnnnnnnnnnnnnnnnnnnnnnnnnnnnnnnnnnnnnnnnnnnnnnnnnnnnnnnnnnnnnnnnnnnnnnnnnnnnnnnnnnnnnnnnnnnnnnnnnnnnnnnnnnnnnnnnnnnnnnnnnnnnnnnnnnnnnnnnnnnnnnnnnnnnnnnnnnnnnnnnnnnnnnnnnnnnnnnnnnnnnnnnnnnnnnnnnnnnnnnnnnnnnnnnnnnnnnnnnnnnnnnnnnnnnnnnnnnnnnnnnnnnnnnnnnnnnnnnnnnnnnnnnnnnnnnnnnnnnnnnnnnnnnnnnnnnnnnnnnnnnnnnnnnnnnnnnnnnnnnnnnnnnnnnnnnnnnnnnnnnnnnnnnnnnnnnnnnnnnnnnnnnnnnnnnnnnnnnnnnnnnnnnnnnnnnnnnnnnnnnnnnnnnnnnnnnnnnnnnnnnnnnnnnnnnnnnnnnnnnnnnnnnnnnnnnnnnnnnnnnnnnnnnnnnnnnnnnnnnnnnnnnnnnnnnnnnnnnnnnnnnnnnnnnnnnnnnnnnnnnnnnnnnnnnnnnnnnnnnnnnnnnnnnnnnnnnnnnnnnnnnnnnnnnnnnnnnnnnnnnnnnnnnnnnnnnnnnnnnnnnnnnnnnnnnnnnnnnnnnnnnnnnnnnnnnnnnnnnnnnnnnnnnnnnnnnnnnnnnnnnnnnnnnnnnnnnnnnnnnnnnnnnnnnnnnnnnnnnnnnnnnnnnnnnnnnnnnnnnnnnnnnnnnnnnnnnnnnnnnnnnnnnnnnnnnnnnnnnnnnnnnnnnnnnnnnnnnnnnnnnnnnnnnnnnnnnnnnnnnnnnnnnnnnnnnnnnnnnnnnnnnnnnnnnnnnnnnnnnnnnnnnnnnnnnnnnnnnnnnnnnnnnnnnnnnnnnnnnnnnnnnnnnnnnnnnnnnnnnnnnnnnnnnnnnnnnnnnnnnnnnnnnnnnnnnnnnnnnnnnnnnnnnnnnnnnnnnnnnnnnnnnnnnnnnnnnnnnnnnnnnnnnnnnnnnnnnnnnnnnnnnnnnnnnnnnnnnnnnnnnnnnnnnnnnnnnnnnnnnnnnnnnnnnnnnnnnnnnnnnnnnnnnnnnnnnnnnnnnnnnnnnnnnnnnnnnnnnnnnnnnnnnnnnnnnnnnnnnnnnnnnnnnnnnnnnnnnnnnnnnnnnnnnnnnnnnnnnnnnnnnnnnnnnnnnnnnnnnnnnnnnnnnnnnnnnnnnnnnnnnnnnnnnnnnnnnnnnnnnnnnnnnnnnnnnnnnnnnnnnnnnnnnnnnnnnnnnnnnnnnnnnnnnnnnnnnnnnnnnnnnnnnnnnnnnnnnnnnnnnnnnnnnnnnnnnnnnnnnnnnnnnnnnnnnnnnnnnnnnnnnnnnnnnnnnnnnnnnnnnnnnnnnnnnnnnnnnnnnnnnnnnnnnnnnnnnnnnnnnnnnnnnnnnnnnnnnnnnnnnnnnnnnnnnnnnnnnnnnnnnnnnnnnnnnnnnnnnnnnnnnnnnnnnnnnnnnnnnnnnnnnnnnnnnnnnnnnnnnnnnnnnnnnnnnnnnnnnnnnnnnnnnnnnnnnnnnnnnnnnnnnnnnnnnnnnnnnnnnnnnnnnnnnnnnnnnnnnnnnnnnnnnnnnnnnnnnnnnnnnnnnnnnnnnnnnnnnnnnnnnnnnnnnnnnnnnnnnnnnnnnnnnnnnnnnnnnnnnnnnnnnnnnnnnnnnnnnnnnnnnnnnnnnnnnnnnnnnnnnnnnnnnnnnnnnnnnnnnnnnnnnnnnnnnnnnnnnnnnnnnnnnnnnnnnnnnnnnnnnnnnnnnnnnnnnnnnnnnnnnnnnnnnnnnnnnnnnnnnnnnnnnnnnnnnnnnnnnnnnnnnnnnnnnnnnnnnnnnnnnnnnnnnnnnnnnnnnnnnnnnnnnnnnnnnnnnnnnnnnnnnnnnnnnnnnnnnnnnnnnnnnnnnnnnnnnnnnnnnnnnnnnnnnnnnnnnnnnnnnnnnnnnnnnnnnnnnnnnnnnnnnnnnnnnnnnnnnnnnnnnnnnnnnnnnnnnnnnnnnnnnnnnnnnnnnnnnnnnnnnnnnnnnnnnnnnnnnnnnnnnnnnnnnnnnnnnnnnnnnnnnnnnnnnnnnnnnnnnnnnnnnnnnnnnnnnnnnnnnnnnnnnnnnnnnnnnnnnnnnnnnnnnnnnnnnnnnnnnnnnnnnnnnnnnnnnnnnnnnnnnnnnnnnnnnnnnnnnnnnnnnnnnnnnnnnnnnnnnnnnnnnnnnnnnnnnnnnnnnnnnnnnnnnnnnnnnnnnnnnnnnnnnnnnnnnnnnnnnnnnnnnnnnnnnnnnnnnnnnnnnnnnnnnnnnnnnnnnnnnnnnnnnnnnnnnnnnnnnnnnnnnnnnnnnnnnnnnnnnnnnnnnnnnnnnnnnnnnnnnnnnnnnnnnnnnnnnnnnnnnnnnnnnnnnnnnnnnnnnnnnnnnnnnnnnnnnnnnnnnnnnnnnnnnnnnnnnnnnnnnnnnnnnnnnnnnnnnnnnnnnnnnnnnnnnnnnnnnnnnnnnnnnnnnnnnnnnnnnnnnnnnnnnnnnnnnnnnnnnnnnnnnnnnnnnnnnnnnnnnnnnnnnnnnnnnnnnnnnnnnnnnnnnnnnnnnnnnnnnnnnnnnnnnnnnnnnnnnnnnnnnnnnnnnnnnnnnnnnnnnnnnnnnnnnnnnnnnnnnnnnnnnnnnnnnnnnnnnnnnnnnnnnnnnnnnnnnnnnnnnnnnnnnnnnnnnnnnnnnnnnnnnnnnnnnnnnnnnnnnnnnnnnnnnnnnnnnnnnnnnnnnnnnnnnnnnnnnnnnnnnnnnnnnnnnnnnnnnnnnnnnnnnnnnnnnnnnnnnnnnnnnnnnnnnnnnnnnnnnnnnnnnnnnnnnnnnnnnnnnnnnnnnnnnnnnnnnnnnnnnnnnnnnnnnnnnnnnnnnnnnnnnnnnnnnnnnnnnnnnnnnnnnnnnnnnnnnnnnnnnnnnnnnnnnnnnnnnnnnnnnnnnnnnnnnnnnnnnnnnnnnnnnnnnnnnnnnnnnnnnnnnnnnnnnnnnnnnnnnnnnnnnnnnnnnnnnnnnnnnnnnnnnnnnnnnnnnnnnnnnnnnnnnnnnnnnnnnnnnnnnnnnnnnnnnnnnnnnnnnnnnnnnnnnnnnnnnnnnnnnnnnnnnnnnnnnnnnnnnnnnnnnnnnnnnnnnnnnnnnnnnnnnnnnnnnnnnnnnnnnnnnnnnnnnnnnnnnnnnnnnnnnnnnnnnnnnnnnnnnnnnnnnnnnnnnnnnnnnnnnnnnnnnnnnnnnnnnnnnnnnnnnnnnnnnnnnnnnnnnnnnnnnnnnnnnnnnnnnnnnnnnnnnnnnnnnnnnnnnnnnnnnnnnnnnnnnnnnnnnnnnnnnnnnnnnnnnnnnnnnnnnnnnnnnnnnnnnnnnnnnnnnnnnnnnnnnnnnnnnnnnnnnnnnnnnnnnnnnnnnnnnnnnnnnnnnnnnnnnnnnnnnnnnnnnnnnnnnnnnnnnnnnnnnnnnnnnnnnnnnnnnnnnnnnnnnnnnnnnnnnnnnnnnnnnnnnnnnnnnnnnnnnnnnnnnnnnnnnnnnnnnnnnnnnnnnnnnnnnnnnnnnnnnnnnnnnnnnnnnnnnnnnnnnnnnnnnnnnnnnnnnnnnnnnnnnnnnnnnnnnnnnnnnnnnnnnnnnnnnnnnnnnnnnnnnnnnnnnnnnnnnnnnnnnnnnnnnnnnnnnnnnnnnnnnnnnnnnnnnnnnnnnnnnnnnnnnnnnnnnnnnnnnnnnnnnnnnnnnnnnnnnnnnnnnnnnnnnnnnnnnnnnnnnnnnnnnnnnnnnnnnnnnnnnnnnnnnnnnnnnnnnnnnnnnnnnnnnnnnnnnnnnnnnnnnnnnnnnnnnnnnnnnnnnnnnnnnnnnnnnnnnnnnnnnnnnnnnnnnnnnnnnnnnnnnnnnnnnnnnnnnnnnnnnnnnnnnnnnnnnnnnnnnnnnnnnnnnnnnnnnnnnnnnnnnnnnnnnnnnnnnnnnnnnnnnnnnnnnnnnnnnnnnnnnnnnnnnnnnnnnnnnnnnnnnnnnnnnnnnnnnnnnnnnnnnnnnnnnnnnnnnnnnnnnnnnnnnnnnnnnnnnnnnnnnnnnnnnnnnnnnnnnnnnnnnnnnnnnnnnnnnnnnnnnnnnnnnnnnnnnnnnnnnnnnnnnnnnnnnnnnnnnnnnnnnnnnnnnnnnnnnnnnnnnnnnnnnnnnnnnnnnnnnnnnnnnnnnnnnnnnnnnnnnnnnnnnnnnnnnnnnnnnnnnnnnnnnnnnnnnnnnnnnnnnnnnnnnnnnnnnnnnnnnnnnnnnnnnnnnnnnnnnnnnnnnnnnnnnnnnnnnnnnnnnnnnnnnnnnnnnnnnnnnnnnnnnnnnnnnnnnnnnnnnnnnnnnnnnnnnnnnnnnnnnnnnnnnnnnnnnnnnnnnnnnnnnnnnnnnnnnnnnnnnnnnnnnnnnnnnnnnnnnnnnnnnnnnnnnnnnnnnnnnnnnnnnnnnnnnnnnnnnnnnnnnnnnnnnnnnnnnnnnnnnnnnnnnnnnnnnnnnnnnnnnnnnnnnnnnnnnnnnnnnnnnnnnnnnnnnnnnnnnnnnnnnnnnnnnnnnnnnnnnnnnnnnnnnnnnnnnnnnnnnnnnnnnnnnnnnnnnnnnnnnnnnnnnnnnnnnnnnnnnnnnnnnnnnnnnnnnnnnnnnnnnnnnnnnnnnnnnnnnnnnnnnnnnnnnnnnnnnnnnnnnnnnnnnnnnnnnnnnnnnnnnnnnnnnnnnnnnnnnnnnnnnnnnnnnnnnnnnnnnnnnnnnnnnnnnnnnnnnnnnnnnnnnnnnnnnnnnnnnnnnnnnnnnnnnnnnnnnnnnnnnnnnnnnnnnnnnnnnnnnnnnnnnnnnnnnnnnnnnnnnnnnnnnnnnnnnnnnnnnnnnnnnnnnnnnnnnnnnnnnnnnnnnnnnnnnnnnnnnnnnnnnnnnnnnnnnnnnnnnnnnnnnnnnnnnnnnnnnnnnnnnnnnnnnnnnnnnnnnnnnnnnnnnnnnnnnnnnnnnnnnnnnnnnnnnnnnnnnnnnnnnnnnnnnnnnnnnnnnnnnnnnnnnnnnnnnnnnnnnnnnnnnnnnnnnnnnnnnnnnnnnnnnnnnnnnnnnnnnnnnnnnnnnnnnnnnnnnnnnnnnnnnnnnnnnnnnnnnnnnnnnnnnnnnnnnnnnnnnnnnnnnnnnnnnnnnnnnnnnnnnnnnnnnnnnnnnnnnnnnnnnnnnnnnnnnnnnnnnnnnnnnnnnnnnnnnnnnnnnnnnnnnnnnnnnnnnnnnnnnnnnnnnnnnnnnnnnnnnnnnnnnnnnnnnnnnnnnnnnnnnnnnnnnnnnnnnnnnnnnnnnnnnnnnnnnnnnnnnnnnnnnnnnnnnnnnnnnnnnnnnnnnnnnnnnnnnnnnnnnnnnnnnnnnnnnnnnnnnnnnnnnnnnnnnnnnnnnnnnnnnnnnnnnnnnnnnnnnnnnnnnnnnnnnnnnnnnnnnnnnnnnnnnnnnnnnnnnnnnnnnnnnnnnnnnnnnnnnnnnnnnnnnnnnnnnnnnnnnnnnnnnnnnnnnnnnnnnnnnnnnnnnnnnnnnnnnnnnnnnnnnnnnnnnnnnnnnnnnnnnnnnnnnnnnnnnnnnnnnnnnnnnnnnnnnnnnnnnnnnnnnnnnnnnnnnnnnnnnnnnnnnnnnnnnnnnnnnnnnnnnnnnnnnnnnnnnnnnnnnnnnnnnnnnnnnnnnnnnnnnnnnnnnnnnnnnnnnnnnnnnnnnnnnnnnnnnnnnnnnnnnnnnnnnnnnnnnnnnnnnnnnnnnnnnnnnnnnnnnnnnnnnnnnnnnnnnnnnnnnnnnnnnnnnnnnnnnnnnnnnnnnnnnnnnnnnnnnnnnnnnnnnnnnnnnnnnnnnnnnnnnnnnnnnnnnnnnnnnnnnnnnnnnnnnnnnnnnnnnnnnnnnnnnnnnnnnnnnnnnnnnttgttttgtttgttttgattactaagttgtccatcagattgtcatgttttaggactattgtcagttttagagagttagagaatttattaagatttttctgccacaaaatacactcgccttaccaccgtttttccgtcaatattagatataaggctctagctaagattctcagctttattaactaggcaacaggtaatcgtaaggcatatttacctgataaaatgctcaaattatacgaaaagactggtaccattccgatattagaatctaatatagggaagcgaggcctttctatagaagccgatacttaagagtatgaaattacagtagacctatctaaaaatagcacaatatctatcttagaaacagctgccgatatatttcgccgagctaatattacaactttaggtacaaaatctgtgacaagtgtattaatcagtatcagaaactaactagttacctagaccctaaaacccccaagttcataaaacagggccattatccagccggagctagtagcttctagctaccagaattgcgatataagtttagaagttttcgtcgaatgtaacattttcttttgtagactgactaagcatgtattaacagtcaattgcggcttttttggtccgtaccaggccataaatgagatccttgataccgacggagatcttcaggaaaggctgacatatgatatgcccggcctctgtgataatatcgttaatcttacgccattacgcttaaagttcacattctcctaggacggggtaacagccagacgcaactcagtttacccgagaaagacagtcggtggccagagtgtaacaaaatgttcggcaccaactgctgagcttaacaaggcagttaggcgaaggggcttgagcctccagtgtgatgaatttccctgggggtctagtgagcagggaggagaatggctacctgcgagtcagcgtcgtacggagtgtgtcaccagcttccagaatgcatggcacggaaattgcgtccgtaagtgcttaattctttttcatctataattgggttgttctggattctgtgggaaacttgctaataaatttttagaattggttggacaactttcatcgaactggaaacaactggaccctgagtcccggaaagattccaagaagatagattattgggcatcatggcagaaacgaaccggtaagcttatattctatttcttcgcaattgggctatctaacactatgtctttttgcgttagactggacccacgcgggcaagtatgggatagggcaaaacataccatatgaacaaaaactcattgaatacggcgaagaaatgcctcctccagatggtggggaccaggtatgtattcaatttcaggatttaggaatttacctaacaaagcggtgacagggagataacaagaagctatcgtgggcttttaaacgggactatgagacttcctggcttaaccctcaaacaccactcacgtccgcagactggtggaatgccaaccaaccgacatggtacaaacccaaatacaatgggcctcttaccatggactcggttctttgcgcggtcaatcattttaatcagggcaacgtgtataaactacctggtgtgaaagtcaagtcagatggaacaccaatcggcgtgcaaaaagagtacaacgcatattgcaaaagaaccaaccagggtggtatggccccccctgcttggggcgtcgattttaccatgggaagatgtctcattcgtttccaaaacagcgcaagcagcagctcgggcacatctaaacgggacgctcagaagtggggtgaatgggaagttgaaagtatgtggacgccgaacgatgtctactcaagcgcttgctgattctccttttaggcattgaatatgtggaggatgtggacgatgccgagatggctcagttattgaagcctgcggatctggatggttctgaacatgaaaggtaacttgccttgaatgtcgatgaattttttattttttatttctttggcggagcagacagccatttgcaagacgccggaaaacggactctcctgttggagcgaattccgaagtgtctggcaactttttcaccttttagttcaccctatctagtgtatatgcaacaccacgttcttcatttcatctattgattagggtctgcaagttcttcttccgtcaattgatacagttccctccctaattctgcactggctcgatacttttccccaacagtagagccctcaaggaattcgttggtttccatccatgtaccaatcacaccaaagagatcgtgaatctcaggatccatacgaccttcgcgaatgacgtttcggaaaccatctaaataaagcacatacaaacttccagaccggaaagcctcctcgtccgcaaggataagatacgtcctcgtggcgcatttttgtaaccctatcgcgaggctatcgatgattgtgtctcggtcatcgcgccaagcctccggggcttcttcttttgcttcggcaatttgcgttttgagatcagagcggaaagtttcaaggtcttctgctttacgggcgcgcggaatcctcattctatcatcgacctcgggttcaagtgggcccgcaagttcgggaagaatctcgtacacacgccgccactccgatccgaagttgaagagatccgcattattgagaaccgcccaccaggcttctgattcaaagggatctgaatcgacccattcagacattaaatcatcgtgtctggctttctcttcttcgtcggtgcaatagtgcgtgcgtagtaaagcgggacaagtctggtcattgaaaagattcattgcgtgccatcgaagcacgtcgctgcggtaaggtcggagaattgtgtccacctcctctgttgtaggcgcacgtggcggatcgatacccgctggaaggctatcccaatcttcggcccattcaaggggaataaattccatgtcgaggaactcagtgaccaacatttttcgttgctagtcgggggttttggtggaggagttattccagtttatctgcacaggattagcatctgaagtagaaacaaaaaggcacaacatacgataagatattgttcgacagccagtgtaccccatggaggaggaggcaaagaatccatgtcattcatcacgaggaaaggttaggaagcttaaagagaagataaaaggggaagatgcggaagagacaccggggaggggtgtggagagcggggctgatatggtgaggaacgcacaaatcattcctttaacctataatcctttgatacacacaagtgaatattaactacatgctcttactaactataacttagttaataccttgcctaaaagatggaaaacacaggtttaaagaggtagtgaatatcgcttttttcttatactcagcccgaagcaatcaccacccggcatttcgctggcacataccgcgcctaacctaaagtggctagaaatagcacgtgacagacacatcttacgggacttgaacggtccgtttgagctcttatggaccatacacggttaacaggcccagctttgaaaatgtggagagaatccgaggtctacattatacaatgcaacgatgacttcacctagtgcgttatatacctcccgcgtatgatagtagcaaacattcacattctccttcaaccctaattatgcgtatgtatcagctaggaacggaatagggaagaagatcggactagtcttatacactattgagcccaagactcatcacattttcgcagaggaaccgctatgcatgccagactaataggattccctcggctggcggcgagtaaatacagccatcttacagggggggggtgtatgtgtgtgaaatcatttaccctgagccctcgcgaacgatatgcagataccactactatatatatccgtgtacgtacatgtagagtgttccacttcctgaaaacgaacctagagcctcatcaaggcctggcgtggcttaattgcccttcccattattaggttgccccggtggcgcgcgactccgaaaccgttgtgacgcctcggcaaagtccagcacggccttgaccgtcctggctcgcgagacggtgtccggtttacctttctcaccttgttttgagcctcccagcaggctcgacacactattaagcgcatctccaacttctctcctcagctctctccgcggttccctcaagtttgggcaatccaccatcgcatgggtgactgtttcttgtgcgccgcatgcgcactggtcgtcgtcactataaatcaggatctcccgccccgggtacagttgagccagtgttccacgctggagtcgccatcgatgcacagattgatgttctcattgacccacaagccagcgttggtatcaagattggtggcggcaagattgttgcgggtaaaaccttgatggatgctcagctgagtggctatgtgaacaccgacgtctccttccaggctcatggtgactacgacacatctgacaatgcattccactaccgatttggggcatatctgtactataacattggttataaggcagtggccaagatcttagacttcgttgactgggcaacaggagatcgcacgtgaatcattagcgtatagatggtgcctattccattggcannnnnnnnnnnnnnnnnnnnnnnnnnnnnnnnnnnnnnnnnnnnnnnnnnnnnnnnnnnnnnnnnnnnnnnnnnnnnnnnnnnnnnnnnnnnnnnnnnnnnnnnnnnnnnnnnnnnnnnnnnnnnnnnnnnnnnnnnnnnnnnnnnnnnnnnnnnnnnnnnnnnnnnnnnnnnnnnnnnnnnnnnnnnnnnnnnnnnnnnnnnnnnnnnnnnnnnnnnnnnnnnnnnnnnnnnnnnnnnnnnnnnnnnnnnnnnnnnnnnnnnnnnnnnnnnnnnnnnnnnnnnnnnnnnnnnnnnnnnnnnnnnnnnnnnnnnnnnnnnnnnnnnnnnnnnnnnnnnnnnnnnnnnnnnnnnnnnnnnnnnnnnnnnnnnnnnnnnnnnnnnnnnnnnnnnnnnnnnnnnnnnnnnnnnnnnnnnnnnnnnnnnnnnnnnnnnnnnnnnnnnnnnnnnnnnnnnnnnnnnnnnnnnnnnnnnnnnnnnnnnnnnnnnnnnnnnnnnnnnnnnnnnnnnnnnnnnnnnnnnnnnnnnnnnnnnnnnnnnnnnnnnnnnnnnnnnnnnnnnnnnnnnnnnnnnnnnnnnnnnnnnnnnnnnnnnnnnnnnnnnnnnnnnnnnnnnnnnnnnnnnnnnnnnnnnnnnnnnnnnnnnnnnnnnnnnnnnnnnnnnnnnnnnnnnnnnnnnnnnnnnnnnnnnnnnnnnnnnnnnnnnnnnnnnnnnnnnnnnnnnnnnnnnnnnnnnnnnnnnnnnnnnnnnnnnnnnnnnnnnnnnnnnnnnnnnnnnnnnnnnnnnnnnnnnnnnnnnnnnnnnnnnnnnnnnnnnnnnnnnnnnnnnnnnnnnnnnnnnnnnnnnnnnnnnnnnnnnnnnnnnnnnnnnnnnnnnnnnnnnnnnnnnnnnnnnnnnnnnnnnnnnnnnnnnnnnnnnnnnnnnnnnnnnnnnnnnnnnnnnnnnnnnnnnnnnnnnnnnnnnnnnnnnnnnnnnnnnnnnnnnnnnnnnnnnnnnnnnnnnnnnnnnnnnnnnnnnnnnnnnnnnnnnnnnnnnnnnnnnnnnnnnnnnnnnnnnnnnnnnnnnnnnnnnnnnnnnnnnnnnnnnnnnnnnnnnnnnnnnnnnnnnnnnnnnnnnnnnnnnnnnnnnnnnnnnnnnnnnnnnnnnnnnnnnnnnnnnnnnnnnnnnnnnnnnnnnnnnnnnnnnnnnnnnnnnnnnnnnnnnnnnnnnnnnnnnnnnnnnnnnnnnnnnnnnnnnnnnnnnnnnnnnnnnnnnnnnnnnnnnnnnnnnnnnnnnnnnnnnnnnnnnnnnnnnnnnnnnnnnnnnnnnnnnnnnnnnnnnnnnnnnnnnnnnnnnnnnnnnnnnnnnnnnnnnnnnnnnnnnnnnnnnnnnnnnnnnnnnnnnnnnnnnnnnnnnnnnnnnnnnnnnnnnnnnnnnnnnnnnnnnnnnnnnnnnnnnnnnnnnnnnnnnnnnnnnnnnnnnnnnnnnnnnnnnnnnnnnnnnnnnnnnnnnnnnnnnnnnnnnnnnnnnnnnnnnnnnnnnnnnnnnnnnnnnnnnnnnnnnnnnnnnnnnnnnnnnnnnnnnnnnnnnnnnnnnnnnnnnnnnnnnnnnnnnnnnnnnnnnnnnnnnnnnnnnnnnnnnnnnnnnnnnnnnnnnnnnnnnnnnnnnnnnnnnnnnnnnnnnnnnnnnnnnnnnnnnnnnnnnnnnnnnnnnnnnnnnnnnnnnnnnnnnnnnnnnnnnnnnnnnnnnnnnnnnnnnnnnnnnnnnnnnnnnnnnnnnnnnnnnnnnnnnnnnnnnnnnnnnnnnnnnnnnnnnnnnnnnnnnnnnnnnnnnnnnnnnnnnnnnnnnnnnnnnnnnnnnnnnnnnnnnnnnnnnnnnnnnnnnnnnnnnnnnnnnnnnnnnnnnnnnnnnnnnnnnnnnnnnnnnnnnnnnnnnnnnnnnnnnnnnnnnnnnnnnnnnnnnnnnnnnnnnnnnnnnnnnnnnnnnnnnnnnnnnnnnnnnnnnnnnnnnnnnnnnnnnnnnnnnnnnnnnnnnnnnnnnnnnnnnnnnnnnnnnnnnnnnnnnnnnnnnnnnnnnnnnnnnnnnnnnnnnnnnnnnnnnnnnnnnnnnnnnnnnnnnnnnnnnnnnnnnnnnnnnnnnnnnnnnnnnnnnnnnnnnnnnnnnnnnnnnnnnnnnnnnnnnnnnnnnnnnnnnnnnnnnnnnnnnnnnnnnnnnnnnnnnnnnnnnnnnnnnnnnnnnnnnnnnnnnnnnnnnnnnnnnnnnnnnnnnnnnnnnnnnnnnnnnnnnnnnnnnnnnnnnnnnnnnnnnnnnnnnnnnnnnnnnnnnnnnnnnnnnnnnnnnnnnnnnnnnnnnnnnnnnnnnnnnnnnnnnnnnnnnnnnnnnnnnnnnnnnnnnnnnnnnnnnnnnnnnnnnnnnnnnnnnnnnnnnnnnnnnnnnnnnnnnnnnnnnnnnnnnnnnnnnnnnnnnnnnnnnnnnnnnnnnnnnnnnnnnnnnnnnnnnnnnnnnnnnnnnnnnnnnnnnnnnnnnnnnnnnnnnnnnnnnnnnnnnnnnnnnnnnnnnnnnnnnnnnnnnnnnnnnnnnnnnnnnnnnnnnnnnnnnnnnnnnnnnnnnnnnnnnnnnnnnnnnnnnnnnnnnnnnnnnnnnnnnnnnnnnnnnnnnnnnnnnnnnnnnnnnnnnnnnnnnnnnnnnnnnnnnnnnnnnnnnnnnnnnnnnnnnnnnnnnnnnnnnnnnnnnnnnnnnnnnnnnnnnnnnnnnnnnnnnnnnnnnnnnnnnnnnnnnnnnnnnnnnnnnnnnnnnnnnnnnnnnnnnnnnnnnnnnnnnnnnnnnnnnnnnnnnnnnnnnnnnnnnnnnnnnnnnnnnnnnnnnnnnnnnnnnnnnnnnnnnnnnnnnnnnnnnnnnnnnnnnnnnnnnnnnnnnnnnnnnnnnnnnnnnnnnnnnnnnnnnnnnnnnnnnnnnnnnnnnnnnnnnnnnnnnnnnnnnnnnnnnnnnnnnnnnnnnnnnnnnnnnnnnnnnnnnnnnnnnnnnnnnnnnnnnnnnnnnnnnnnnnnnnnnnnnnnnnnnnnnnnnnnnnnnnnnnnnnnnnnnnnnnnnnnnnnnnnnnnnnnnnnnnnnnnnnnnnnnnnnnnnnnnnnnnnnnnnnnnnnnnnnnnnnnnnnnnnnnnnnnnnnnnnnnnnnnnnnnnnnnnnnnnnnnnnnnnnnnnnnnnnnnnnnnnnnnnnnnnnnnnnnnnnnnnnnnnnnnnnnnnnnnnnnnnnnnnnnnnnnnnnnnnnnnnnnnnnnnnnnnnnnnnnnnnnnnnnnnnnnnnnnnnnnnnnnnnnnnnnnnnnnnnnnnnnnnnnnnnnnnnnnnnnnnnnnnnnnnnnnnnnnnnnnnnnnnnnnnnnnnnnnnnnnnnnnnnnnnnnnnnnnnnnnnnnnnnnnnnnnnnnnnnnnnnnnnnnnnnnnnnnnnnnnnnnnnnnnnnnnnnnnnnnnnnnnnnnnnnnnnnnnnnnnnnnnnnnnnnnnnnnnnnnnnnnnnnnnnnnnnnnnnnnnnnnnnnnnnnnnnnnnnnnnnnnnnnnnnnnnnnnnnnnnnnnnnnnnnnnnnnnnnnnnnnnnnnnnnnnnnnnnnnnnnnnnnnnnnnnnnnnnnnnnnnnnnnnnnnnnnnnnnnnnnnnnnnnnnnnnnnnnnnnnnnnnnnnnnnnnnnnnnnnnnnnnnnnnnnnnnnnnnnnnnnnnnnnnnnnnnnnnnnnnnnnnnnnnnnnnnnnnnnnnnnnnnnnnnnnnnnnnnnnnnnnnnnnnnnnnnnnnnnnnnnnnnnnnnnnnnnnnnnnnnnnnnnnnnnnnnnnnnnnnnnnnnnnnnnnnnnnnnnnnnnnnnnnnnnnnnnnnnnnnnnnnnnnnnnnnnnnnnnnnnnnnnnnnnnnnnnnnnnnnnnnnnnnnnnnnnnnnnnnnnnnnnnnnnnnnnnnnnnnnnnnnnnnnnnnnnnnnnnnnnnnnnnnnnnnnnnnnnnnnnnnnnnnnnnnnnnnnnnnnnnnnnnnnnnnnnnnnnnnnnnnnnnnnnnnnnnnnnnnnnnnnnnnnnnnnnnnnnnnnnnnnnnnnnnnnnnnnnnnnnnnnnnnnnnnnnnnnnnnnnnnnnnnnnnnnnnnnnnnnnnnnnnnnnnnnnnnnnnnnnnnnnnnnnnnnnnnnnnnnnnnnnnnnnnnnnnnnnnnnnnnnnnnnnnnnnnnnnnnnnnnnnnnnnnnnnnnnnnnnnnnnnnnnnnnnnnnnnnnnnnnnnnnnnnnnnnnnnnnnnnnnnnnnnnnnnnnnnnnnnnnnnnnnnnnnnnnnnnnnnnnnnnnnnnnnnnnnnnnnnnnnnnnnnnnnnnnnnnnnnnnnnnnnnnnnnnnnnnnnnnnnnnnnnnnnnnnnnnnnnnnnnnnnnnnnnnnnnnnnnnnnnnnnnnnnnnnnnnnnnnnnnnnnnnnnnnnnnnnnnnnnnnnnnnnnnnnnnnnnnnnnnnnnnnnnnnnnnnnnnnnnnnnnnnnnnnnnnnnnnnnnnnnnnnnnnnnnnnnnnnnnnnnnnnnnnnnnnnnnnnnnnnnnnnnnnnnnnnnnnnnnnnnnnnnnnnnnnnnnnnnnnnnnnnnnnnnnnnnnnnnnnnnnnnnnnnnnnnnnnnnnnnnnnnnnnnnnnnnnnnnnnnnnnnnnnnnnnnnnnnnnnnnnnnnnnnnnnnnnnnnnnnnnnnnnnnnnnnnnnnnnnnnnnnnnnnnnnnnnnnnnnnnnnnnnnnnnnnnnnnnnnnnnnnnnnnnnnnnnnnnnnnnnnnnnnnnnnnnnnnnnnnnnnnnnnnnnnnnnnnnnnnnnnnnnnnnnnnnnnnnnnnnnnnnnnnnnnnnnnnnnnnnnnnnnnnnnnnnnnnnnnnnnnnnnnnnnnnnnnnnnnnnnnnnnnnnnnnnnnnnnnnnnnnnnnnnnnnnnnnnnnnnnnnnnnnnnnnnnnnnnnnnnnnnnnnnnnnnnnnnnnnnnnnnnnnnnnnnnnnnnnnnnnnnnnnnnnnnnnnnnnnnnnnnnnnnnnnnnnnnnnnnnnnnnnnnnnnnnnnnnnnnnnnnnnnnnnnnnnnnnnnnnnnnnnnnnnnnnnnnnnnnnnnnnnnnnnnnnnnnnnnnnnnnnnnnnnnnnnnnnnnnnnnnnnnnnnnnnnnnnnnnnnnnnnnnnnnnnnnnnnnnnnnnnnnnnnnnnnnnnnnnnnnnnnnnnnnnnnnnnnnnnnnnnnnnnnnnnnnnnnnnnnnnnnnnnnnnnnnnnnnnnnnnnnnnnnnnnnnnnnnnnnnnnnnnnnnnnnnnnnnnnnnnnnnnnnnnnnnnnnnnnnnnnnnnnnnnnnnnnnnnnnnnnnnnnnnnnnnnnnnnnnnnnnnnnnnnnnnnnnnnnnnnnnnnnnnnnnnnnnnnnnnnnnnnnnnnnnnnnnnnnnnnnnnnnnnnnnnnnnnnnnnnnnnnnnnnnnnnnnnnnnnnnnnnnnnnnnnnnnnnnnnnnnnnnnnnnnnnnnnnnnnnnnnnnnnnnnnnnnnnnnnnnnnnnnnnnnnnnnnnnnnnnnnnnnnnnnnnnnnnnnnnnnnnnnnnnnnnnnnnnnnnnnnnnnnnnnnnnnnnnnnnnnnnnnnnnnnnnnnnnnnnnnnnnnnnnnnnnnnnnnnnnnnnnnnnnnnnnnnnnnnnnnnnnnnnnnnnnnnnnnnnnnnnnnnnnnnnnnnnnnnnnnnnnnnnnnnnnnnnnnnnnnnnnnnnnnnnnnnnnnnnnnnnnnnnnnnnnnnnnnnnnnnnnnnnnnnnnnnnnnnnnnnnnnnnnnnnnnnnnnnnnnnnnnnnnnnnnnnnnnnnnnnnnnnnnnnnnnnnnnnnnnnnnnnnnnnnnnnnnnnnnnnnnnnnnnnnnnnnnnnnnnnnnnnnnnnnnnnnnnnnnnnnnnnnnnnnnnnnnnnnnnnnnnnnnnnnnnnnnnnnnnnnnnnnnnnnnnnnnnnnnnnnnnnnnnnnnnnnnnnnnnnnnnnnnnnnnnnnnnnnnnnnnnnnnnnnnnnnnnnnnnnnnnnnnnnnnnnnnnnnnnnnnnnnnnnnnnnnnnnnnnnnnnnnnnnnnnnnnnnnnnnnnnnnnnnnnnnnnnnnnnnnnnnnnnnnnnnnnnnnnnnnnnnnnnnnnnnnnnnnnnnnnnnnnnnnnnnnnnnnnnnnnnnnnnnnnnnnnnnnnnnnnnnnnnnnnnnnnnnnnnnnnnnnnnnnnnnnnnnnnnnnnnnnnnnnnnnnnnnnnnnnnnnnnnnnnnnnnnnnnnnnnnnnnnnnnnnnnnnnnnnnnnnnnnnnnnnnnnnnnnnnnnnnnnnnnnnnnnnnnnnnnnnnnnnnnnnnnnnnnnnnnnnnnnnnnnnnnnnnnnnnnnnnnnnnnnnnnnnnnnnnnnnnnnnnnnnnnnnnnnnnnnnnnnnnnnnnnnnnnnnnnnnnnnnnnnnnnnnnnnnnnnnnnnnnnnnnnnnnnnnnnnnnnnnnnnnnnnnnnnnnnnnnnnnnnnnnnnnnnnnnnnnnnnnnnnnnnnnnnnnnnnnnnnnnnnnnnnnnnnnnnnnnnnnnnnnnnnnnnnnnnnnnnnnnnnnnnnnnnnnnnnnnnnnnnnnnnnnnnnnnnnnnnnnnnnnnnnnnnnnnnnnnnnnnnnnnnnnnnnnnnnnnnnnnnnnnnnnnnnnnnnnnnnnnnnnnnnnnnnnnnnnnnnnnnnnnnnnnnnnnnnnnnnnnnnnnnnnnnnnnnnnnnnnnnnnnnnnnnnnnnnnnnnnnnnnnnnnnnnnnnnnnnnnnnnnnnnnnnnnnnnnnnnnnnnnnnnnnnnnnnnnnnnnnnnnnnnnnnnnnnnnnnnnnnnnnnnnnnnnnnnnnnnnnnnnnnnnnnnnnnnnnnnnnnnnnnnnnnnnnnnnnnnnnnnnnnnnnnnnnnnnnnnnnnnnnnnnnnnnnnnnnnnnnnnnnnnnnnnnnnnnnnnnnnnnnnnnnnnnnnnnnnnnnnnnnnnnnnnnnnnnnnnnnnnnnnnnnnnnnnnnnnnnnnnnnnnnnnnnnnnnnnnnnnnnnnnnnnnnnnnnnnnnnnnnnnnnnnnnnnnnnnnnnnnnnnnnnnnnnnnnnnnnnnnnnnnnnnnnnnnnnnnnnnnnnnnnnnnnnnnnnnnnnnnnnnnnnnnnnnnnnnnnnnnnnnnnnnnnnnnnnnnnnnnnnnnnnnnnnnnnnnnnnnnnnnnnnnnnnnnnnnnnnnnnnnnnnnnnnnnnnnnnnnnnnnnnnnnnnnnnnnnnnnnnnnnnnnnnnnnnnnnnnnnnnnnnnnnnnnnnnnnnnnnnnnnnnnnnnnnnnnnnnnnnnnnnnnnnnnnnnnnnnnnnnnnnnnnnnnnnnnnnnnnnnnnnnnnnnnnnnnnnnnnnnnnnnnnnnnnnnnnnnnnnnnnnnnnnnnnnnnnnnnnnnnnnnnnnnnnnnnnnnnnnnnnnnnnnnnnnnnnnnnnnnnnnnnnnnnnnnnnnnnnnnnnnnnnnnnnnnnnnnnnnnnnnnnnnnnnnnnnnnnnnnnnnnnnnnnnnnnnnnnnnnnnnnnnnnnnnnnnnnnnnnnnnnnnnnnnnnnnnnnnnnnnnnnnnnnnnnnnnnnnnnnnnnnnnnnnnnnnnnnnnnnnnnnnnnnnnnnnnnnnnnnnnnnnnnnnnnnnnnnnnnnnnnnnnnnnnnnnnnnnnnnnnnnnnnnnnnnnnnnnnnnnnnnnnnnnnnnnnnnnnnnnnnnnnnnnnnnnnnnnnnnnnnnnnnnnnnnnnnnnnnnnnnnnnnnnnnnnnnnnnnnnnnnnnnnnnnnnnnnnnnnnnnnnnnnnnnnnnnnnnnnnnnnnnnnnnnnnnnnnnnnnnnnnnnnnnnnnnnnnnnnnnnnnnnnnnnnnnnnnnnnnnnnnnnnnnnnnnnnnnnnnnnnnnnnnnnnnnnnnnnnnnnnnnnnnnnnnnnnnnnnnnnnnnnnnnnnnnnnnnnnnnnnnnnnnnnnnnnnnnnnnnnnnnnnnnnnnnnnnnnnnnnnnnnnnnnnnnnnnnnnnnnnnnnnnnnnnnnnnnnnnnnnnnnnnnnnnnnnnnnnnnnnnnnnnnnnnnnnnnnnnnnnnnnnnnnnnnnnnnnnnnnnnnnnnnnnnnnnnnnnnnnnnnnnnnnnnnnnnnnnnnnnnnnnnnnnnnnnnnnnnnnnnnnnnnnnnnnnnnnnnnnnnnnnnnnnnnnnnnnnnnnnnnnnnnnnnnnnnnnnnnnnnnnnnnnnnnnnnnnnnnnnnnnnnnnnnnnnnnnnnnnnnnnnnnnnnnnnnnnnnnnnnnnnnnnnnnnnnnnnnnnnnnnnnnnnnnnnnnnnnnnnnnnnnnnnnnnnnnnnnnnnnnnnnnnnnnnnnnnnnnnnnnnnnnnnnnnnnnnnnnnnnnnnnnnnnnnnnnnnnnnnnnnnnnnnnnnnnnnnnnnnnnnnnnnnnnnnnnnnnnnnnnnnnnnnnnnnnnnnnnnnnnnnnnnnnnnnnnnnnnnnnnnnnnnnnnnnnnnnnnnnnnnnnnnnnnnnnnnnnnnnnnnnnnnnnnnnnnnnnnnnnnnnnnnnnnnnnnnnnnnnnnnnnnnnnnnnnnnnnnnnnnnnnnnnnnnnnnnnnnnnnnnnnnnnnnnnnnnnnnnnnnnnnnnnnnnnnnnnnnnnnnnnnnnnnnnnnnnnnnnnnnnnnnnnnnnnnnnnnnnnnnnnnnnnnnnnnnnnnnnnnnnnnnnnnnnnnnnnnnnnnnnnnnnnnnnnnnnnnnnnnnnnnnnnnnnnnnnnnnnnnnnnnnnnnnnnnnnnnnnnnnnnnnnnnnnnnnnnnnnnnnnnnnnnnnnnnnnnnnnnnnnnnnnnnnnnnnnnnnnnnnnnnnnnnnnnnnnnnnnnnnnnnnnnnnnnnnnnnnnnnnnnnnnnnnnnnnnnnnnnnnnnnnnnnnnnnnnnnnnnnnnnnnnnnnnnnnnnnnnnnnnnnnnnnnnnnnnnnnnnnnnnnnnnnnnnnnnnnnnnnnnnnnnnnnnnnnnnnnnnnnnnnnnnnnnnnnnnnnnnnnnnnnnnnnnnnnnnnnnnnnnnnnnnnnnnnnnnnnnnnnnnnnnnnnnnnnnnnnnnnnnnnnnnnnnnnnnnnnnnnnnnnnnnnnnnnnnnnnnnnnnnnnnnnnnnnnnnnnnnnnnnnnnnnnnnnnnnnnnnnnnnnnnnnnnnnnnnnnnnnnnnnnnnnnnnnnnnnnnnnnnnnnnnnnnnnnnnnnnnnnnnnnnnnnnnnnnnnnnnnnnnnnnnnnnnnnnnnnnnnnnnnnnnnnnnnnnnnnnnnnnnnnnnnnnnnnnnnnnnnnnnnnnnnnnnnnnnnnnnnnnnnnnnnnnnnnnnnnnnnnnnnnnnnnnnnnnnnnnnnnnnnnnnnnnnnnnnnnnnnnnnnnnnnnnnnnnnnnnnnnnnnnnnnnnnnnnnnnnnnnnnnnnnnnnnnnnnnnnnnnnnnnnnnnnnnnnnnnnnnnnnnnnnnnnnnnnnnnnnnnnnnnnnnnnnnnnnnnnnnnnnnnnnnnnnnnnnnnnnnnnnnnnnnnnnnnnnnnnnnnnnnnnnnnnnnnnnnnnnnnnnnnnnnnnnnnnnnnnnnnnnnnnnnnnnnnnnnnnnnnnnnnnnnnnnnnnnnnnnnnnnnnnnnnnnnnnnnnnnnnnnnnnnnnnnnnnnnnnnnnnnnnnnnnnnnnnnnnnnnnnnnnnnnnnnnnnnnnnnnnnnnnnnnnnnnnnnnnnnnnnnnnnnnnnnnnnnnnnnnnnnnnnnnnnnnnnnnnnnnnnnnnnnnnnnnnnnnnnnnnnnnnnnnnnnnnnnnnnnnnnnnnnnnnnnnnnnnnnnnnnnnnnnnnnnnnnnnnnnnnnnnnnnnnnnnnnnnnnnnnnnnnnnnnnnnnnnnnnnnnnnnnnnnnnnnnnnnnnnnnnnnnnnnnnnnnnnnnnnnnnnnnnnnnnnnnnnnnnnnnnnnnnnnnnnnnnnnnnnnnnnnnnnnnnnnnnnnnnnnnnnnnnnnnnnnnnnnnnnnnnnnnnnnnnnnnnnnnnnnnnnnnnnnnnnnnnnnnnnnnnnnnnnnnnnnnnnnnnnnnnnnnnnnnnnnnnnnnnnnnnnnnnnnnnnnnnnnnnnnnnnnnnnnnnnnnnnnnnnnnnnnnnnnnnnnnnnnnnnnnnnnnnnnnnnnnnnnnnnnnnnnnnnnnnnnnnnnnnnnnnnnnnnnnnnnnnnnnnnnnnnnnnnnnnnnnnnnnnnnnnnnnnnnnnnnnnnnnnnnnnnnnnnnnnnnnnnnnnnnnnnnnnnnnnnnnnnnnnnnnnnnnnnnnnnnnnnnnnnnnnnnnnnnnnnnnnnnnnnnnnnnnnnnnnnnnnnnnnnnnnnnnnnnnnnnnnnnnnnnnnnnnnnnnnnnnnnnnnnnnnnnnnnnnnnnnnnnnnnnnnnnnnnnnnnnnnnnnnnnnnnnnnnnnnnnnnnnnnnnnnnnnnnnnnnnnnnnnnnnnnnnnnnnnnnnnnnnnnnnnnnnnnnnnnnnnnnnnnnnnnnnnnnnnnnnnnnnnnnnnnnnnnnnnnnnnnnnnnnnnnnnnnnnnnnnnnnnnnnnnnnnnnnnnnnnnnnnnnnnnnnnnnnnnnnnnnnnnnnnnnnnnnnnnnnnnnnnnnnnnnnnnnnnnnnnnnnnnnnnnnnnnnnnnnnnnnnnnnnnnnnnnnnnnnnnnnnnnnnnnnnnnnnnnnnnnnnnnnnnnnnnnnnnnnnnnnnnnnnnnnnnnnnnnnnnnnnnnnnnnnnnnnnnnnnnnnnnnnnnnnnnnnnnnnnnnnnnnnnnnnnnnnnnnnnnnnnnnnnnnnnnnnnnnnnnnnnnnnnnnnnnnnnnnnnnnnnnnnnnnnnnnnnnnnnnnnnnnnnnnnnnnnnnnnnnnnnnnnnnnnnnnnnnnnnnnnnnnnnnnnnnnnnnnnnnnnnnnnnnnnnnnnnnnnnnnnnnnnnnnnnnnnnnnnnnnnnnnnnnnnnnnnnnnnnnnnnnnnnnnnnnnnnnnnnnnnnnnnnnnnnnnnnnnnnnnnnnnnnnnnnnnnnnnnnnnnnnnnnnnnnnnnnnnnnnnnnnnnnnnnnnnnnnnnnnnnnnnnnnnnnnnnnnnnnnnnnnnnnnnnnnnnnnnnnnnnnnnnnnnnnnnnnnnnnnnnnnnnnnnnnnnnnnnnnnnnnnnnnnnnnnnnnnnnnnnnnnnnnnnnnnnnnnnnnnnnnnnnnnnnnnnnnnnnnnnnnnnnnnnnnnnnnnnnnnnnnnnnnnnnnnnnnnnnnnnnnnnnnnnnnnnnnnnnnnnnnnnnnnnnnnnnnnnnnnnnnnnnnnnnnnnnnnnnnnnnnnnnnnnnnnnnnnnnnnnnnnnnnnnnnnnnnnnnnnnnnnnnnnnnnnnnnnnnnnnnnnnnnnnnnnnnnnnnnnnnnnnnnnnnnnnnnnnnnnnnnnnnnnnnnnnnnnnnnnnnnnnnnnnnnnnnnnnnnnnnnnnnnnnnnnnnnnnnnnnnnnnnnnnnnnnnnnnnnnnnnnnnnnnnnnnnnnnnnnnnnnnnnnnnnnnnnnnnnnnnnnnnnnnnnnnnnnnnnnnnnnnnnnnnnnnnnnnnnnnnnnnnnnnnnnnnnnnnnnnnnnnnnnnnnnnnnnnnnnnnnnnnnnnnnnnnnnnnnnnnnnnnnnnnnnnnnnnnnnnnnnnnnnnnnnnnnnnnnnnnnnnnnnnnnnnnnnnnnnnnnnnnnnnnnnnnnnnnnnnnnnnnnnnnnnnnnnnnnnnnnnnnnnnnnnnnnnnnnnnnnnnnnnnnnnnnnnnnnnnnnnnnnnnnnnnnnnnnnnnnnnnnnnnnnnnnnnnnnnnnnnnnnnnnnnnnnnnnnnnnnnnnnnnnnnnnnnnnnnnnnnnnnnnnnnnnnnnnnnnnnnnnnnnnnnnnnnnnnnnnnnnnnnnnnnnnnnnnnnnnnnnnnnnnnnnnnnnnnnnnnnnnnnnnnnnnnnnnnnnnnnnnnnnnnnnnnnnnnnnnnnnnnnnnnnnnnnnnnnnnnnnnnnnnnnnnnnnnnnnnnnnnnnnnnnnnnnnnnnnnnnnnnnnnnnnnnnnnnnnnnnnnnnnnnnnnnnnnnnnnnnnnnnnnnnnnnnnnnnnnnnnnnnnnnnnnnnnnnnnnnnnnnnnnnnnnnnnnnnnnnnnnnnnnnnnnnnnnnnnnnnnnnnnnnnnnnnnnnnnnnnnnnnnnnnnnnnnnnnnnnnnnnnnnnnnnnnnnnnnnnnnnnnnnnnnnnnnnnnnnnnnnnnnnnnnnnnnnnnnnnnnnnnnnnnnnnnnnnnnnnnnnnnnnnnnnnnnnnnnnnnnnnnnnnnnnnnnnnnnnnnnnnnnnnnnnnnnnnnnnnnnnnnnnnnnnnnnnnnnnnnnnnnnnnnnnnnnnnnnnnnnnnnnnnnnnnnnnnnnnnnnnnnnnnnnnnnnnnnnnnnnnnnnnnnnnnnnnnnnnnnnnnnnnnnnnnnnnnnnnnnnnnnnnnnnnnnnnnnnnnnnnnnnnnnnnnnnnnnnnnnnnnnnnnnnnnnnnnnnnnnnnnnnnnnnnnnnnnnnnnnnnnnnnnnnnnnnnnnnnnnnnnnnnnnnnnnnnnnnnnnnnnnnnnnnnnnnnnnnnnnnnnnnnnnnnnnnnnnnnnnnnnnnnnnnnnnnnnnnnnnnnnnnnnnnnnnnnnnnnnnnnnnnnnnnnnnnnnnnnnnnnnnnnnnnnnnnnnnnnnnnnnnnnnnnnnnnnnnnnnnnnnnnnnnnnnnnnnnnnnnnnnnnnnnnnnnnnnnnnnnnnnnnnnnnnnnnnnnnnnnnnnnnnnnnnnnnnnnnnnnnnnnnnnnnnnnnnnnnnnnnnnnnnnnnnnnnnnnnnnnnnnnnnnnnnnnnnnnnnnnnnnnnnnnnnnnnnnnnnnnnnnnnnnnnnnnnnnnnnnnnnnnnnnnnnnnnnnnnnnnnnnnnnnnnnnnnnnnnnnnnnnnnnnnnnnnnnnnnnnnnnnnnnnnnnnnnnnnnnnnnnnnnnnnnnnnnnnnnnnnnnnnnnnnnnnnnnnnnnnnnnnnnnnnnnnnnnnnnnnnnnnnnnnnnnnnnnnnnnnnnnnnnnnnnnnnnnnnnnnnnnnnnnnnnnnnnnnnnnnnnnnnnnnnnnnnnnnnnnnnnnnnnnnnnnnnnnnnnnnnnnnnnnnnnnnnnnnnnnnnnnnnnnnnnnnnnnnnnnnnnnnnnnnnnnnnnnnnnnnnnnnnnnnnnnnnnnnnnnnnnnnnnnnnnnnnnnnnnnnnnnnnnnnnnnnnnnnnnnnnnnnnnnnnnnnnnnnnnnnnnnnnnnnnnnnnnnnnnnnnnnnnnnnnnnnnnnnnnnnnnnnnnnnnnnnnnnnnnnnnnnnnnnnnnnnnnnnnnnnnnnnnnnnnnnnnnnnnnnnnnnnnnnnnnnnnnnnnnnnnnnnnnnnnnnnnnnnnnnnnnnnnnnnnnnnnnnnnnnnnnnnnnnnnnnnnnnnnnnnnnnnnnnnnnnnnnnnnnnnnnnnnnnnnnnnnnnnnnnnnnnnnnnnnnnnnnnnnnnnnnnnnnnnnnnnnnnnnnnnnnnnnnnnnnnnnnnnnnnnnnnnnnnnnnnnnnnnnnnnnnnnnnnnnnnnnnnnnnnnnnnnnnnnnnnnnnnnnnnnnnnnnnnnnnnnnnnnnnnnnnnnnnnnnnnnnnnnnnnnnnnnnnnnnnnnnnnnnnnnnnnnnnnnnnnnnnnnnnnnnnnnnnnnnnnnnnnnnnnnnnnnnnnnnnnnnnnnnnnnnnnnnnnnnnnnnnnnnnnnnnnnnnnnnnnnnnnnnnnnnnnnnnnnnnnnnnnnnnnnnnnnnnnnnnnnnnnnnnnnnnnnnnnnnnnnnnnnnnnnnnnnnnnnnnnnnnnnnnnnnnnnnnnnnnnnnnnnnnnnnnnnnnnnnnnnnnnnnnnnnnnnnnnnnnnnnnnnnnnnnnnnnnnnnnnnnnnnnnnnnnnnnnnnnnnnnnnnnnnnnnnnnnnnnnnnnnnnnnnnnnnnnnnnnnnnnnnnnnnnnnnnnnnnnnnnnnnnnnnnnnnnnnnnnnnnnnnnnnnnnnnnnnnnnnnnnnnnnnnnnnnnnnnnnnnnnnnnnnnnnnnnnnnnnnnnnnnnnnnnnnnnnnnnnnnnnnnnnnnnnnnnnnnnnnnnnnnnnnnnnnnnnnnnnnnnnnnnnnnnnnnnnnnnnnnnnnnnnnnnnnnnnnnnnnnnnnnnnnnnnnnnnnnnnnnnnnnnnnnnnnnnnnnnnnnnnnnnnnnnnnnnnnnnnnnnnnnnnnnnnnnnnnnnnnnnnnnnnnnnnnnnnnnnnnnnnnnnnnnnnnnnnnnnnnnnnnnnnnnnnnnnnnnnnnnnnnnnnnnnnnnnnnnnnnnnnnnnnnnnnnnnnnnnnnnnnnnnnnnnnnnnnnnnnnnnnnnnnnnnnnnnnnnnnnnnnnnnnnnnnnnnnnnnnnnnnnnnnnnnnnnnnnnnnnnnnnnnnnnnnnnnnnnnnnnnnnnnnnnnnnnnnnnnnnnnnnnnnnnnnnnnnnnnnnnnnnnnnnnnnnnnnnnnnnnnnnnnnnnnnnnnnnnnnnnnnnnnnnnnnnnnnnnnnnnnnnnnnnnnnnnnnnnnnnnnnnnnnnnnnnnnnnnnnnnnnnnnnnnnnnnnnnnnnnnnnnnnnnnnnnnnnnnnnnnnnnnnnnnnnnnnnnnnnnnnnnnnnnnnnnnnnnnnnnnnnnnnnnnnnnnnnnnnnnnnnnnnnnnnnnnnnnnnnnnnnnnnnnnnnnnnnnnnnnnnnnnnnnnnnnnnnnnnnnnnnnnnnnnnnnnnnnnnnnnnnnnnnnnnnnnnnnnnnnnnnnnnnnnnnnnnnnnnnnnnnnnnnnnnnnnnnnnnnnnnnnnnnnnnnnnnnnnnnnnnnnnnnnnnnnnnnnnnnnnnnnnnnnnnnnnnnnnnnnnnnnnnnnnnnnnnnnnnnnnnnnnnnnnnnnnnnnnnnnnnnnnnnnnnnnnnnnnnnnnnnnnnnnnnnnnnnnnnnnnnnnnnnnnnnnnnnnnnnnnnnnnnnnnnnnnnnnnnnnnnnnnnnnnnnnnnnnnnnnnnnnnnnnnnnnnnnnnnnnnnnnnnnnnnnnnnnnnnnnnnnnnnnnnnnnnnnnnnnnnnnnnnnnnnnnnnnnnnnnnnnnnnnnnnnnnnnnnnnnnnnnnnnnnnnnnnnnnnnnnnnnnnnnnnnnnnnnnnnnnnnnnnnnnnnnnnnnnnnnnnnnnnnnnnnnnnnnnnnnnnnnnnnnnnnnnnnnnnnnnnnnnnnnnnnnnnnnnnnnnnnnnnnnnnnnnnnnnnnnnnnnnnnnnnnnnnnnnnnnnnnnnnnnnnnnnnnnnnnnnnnnnnnnnnnnnnnnnnnnnnnnnnnnnnnnnnnnnnnnnnnnnnnnnnnnnnnnnnnnnnnnnnnnnnnnnnnnnnnnnnnnnnnnnnnnnnnnnnnnnnnnnnnnnnnnnnnnnnnnnnnnnnnnnnnnnnnnnnnnnnnnnnnnnnnnnnnnnnnnnnnnnnnnnnnnnnnnnnnnnnnnnnnnnnnnnnnnnnnnnnnnnnnnnnnnnnnnnnnnnnnnnnnnnnnnnnnnnnnnnnnnnnnnnnnnnnnnnnnnnnnnnnnnnnnnnnnnnnnnnnnnnnnnnnnnnnnnnnnnnnnnnnnnnnnnnnnnnnnnnnnnnnnnnnnnnnnnnnnnnnnnnnnnnnnnnnnnnnnnnnnnnnnnnnnnnnnnnnnnnnnnnnnnnnnnnnnnnnnnnnnnnnnnnnnnnnnnnnnnnnnnnnnnnnnnnnnnnnnnnnnnnnnnnnnnnnnnnnnnnnnnnnnnnnnnnnnnnnnnnnnnnnnnnnnnnnnnnnnnnnnnnnnnnnnnnnnnnnnnnnnnnnnnnnnnnnnnnnnnnnnnnnnnnnnnnnnnnnnnnnnnnnnnnnnnnnnnnnnnnnnnnnnnnnnnnnnnnnnnnnnnnnnnnnnnnnnnnnnnnnnnnnnnnnnnnnnnnnnnnnnnnnnnnnnnnnnnnnnnnnnnnnnnnnnnnnnnnnnnnnnnnnnnnnnnnnnnnnnnnnnnnnnnnnnnnnnnnnnnnnnnnnnnnnnnnnnnnnnnnnnnnnnnnnnnnnnnnnnnnnnnnnnnnnnnnnnnnnnnnnnnnnnnnnnnnnnnnnnnnnnnnnnnnnnnnnnnnnnnnnnnnnnnnnnnnnnnnnnnnnnnnnnnnnnnnnnnnnnnnnnnnnnnnnnnnnnnnnnnnnnnnnnnnnnnnnnnnnnnnnnnnnnnnnnnnnnnnnnnnnnnnnnnnnnnnnnnnnnnnnnnnnnnnnnnnnnnnnnnnnnnnnnnnnnnnnnnnnnnnnnnnnnnnnnnnnnnnnnnnnnnnnnnnnnnnnnnnnnnnnnnnnnnnnnnnnnnnnnnnnnnnnnnnnnnnnnnnnnnnnnnnnnnnnnnnnnnnnnnnnnnnnnnnnnnnnnnnnnnnnnnnnnnnnnnnnnnnnnnnnnnnnnnnnnnnnnnnnnnnnnnnnnnnnnnnnnnnnnnnnnnnnnnnnnnnnnnnnnnnnnnnnnnnnnnnnnnnnnnnnnnnnnnnnnnnnnnnnnnnnnnnnnnnnnnnnnnnnnnnnnnnnnnnnnnnnnnnnnnnnnnnnnnnnnnnnnnnnnnnnnnnnnnnnnnnnnnnnnnnnnnnnnnnnnnnnnnnnnnnnnnnnnnnnnnnnnnnnnnnnnnnnnnnnnnnnnnnnnnnnnnnnnnnnnnnnnnnnnnnnnnnnnnnnnnnnnnnnnnnnnnnnnnnnnnnnnnnnnnnnnnnnnnnnnnnnnnnnnnnnnnnnnnnnnnnnnnnnnnnnnnnnnnnnnnnnnnnnnnnnnnnnnnnnnnnnnnnnnnnnnnnnnnnnnnnnnnnnnnnnnnnnnnnnnnnnnnnnnnnnnnnnnnnnnnnnnnnnnnnnnnnnnnnnnnnnnnnnnnnnnnnnnnnnnnnnnnnnnnnnnnnnnnnnnnnnnnnnnnnnnnnnnnnnnnnnnnnnnnnnnnnnnnnnnnnnnnnnnnnnnnnnnnnnnnnnnnnnnnnnnnnnnnnnnnnnnnnnnnnnnnnnnnnnnnnnnnnnnnnnnnnnnnnnnnnnnnnnnnnnnnnnnnnnnnnnnnnnnnnnnnnnnnnnnnnnnnnnnnnnnnnnnnnnnnnnnnnnnnnnnnnnnnnnnnnnnnnnnnnnnnnnnnnnnnnnnnnnnnnnnnnnnnnnnnnnnnnnnnnnnnnnnnnnnnnnnnnnnnnnnnnnnnnnnnnnnnnnnnnnnnnnnnnnnnnnnnnnnnnnnnnnnnnnnnnnnnnnnnnnnnnnnnnnnnnnnnnnnnnnnnnnnnnnnnnnnnnnnnnnnnnnnnnnnnnnnnnnnnnnnnnnnnnnnnnnnnnnnnnnnnnnnnnnnnnnnnnnnnnnnnnnnnnnnnnnnnnnnnnnnnnnnnnnnnnnnnnnnnnnnnnnnnnnnnnnnnnnnnnnnnnnnnnnnnnnnnnnnnnnnnnnnnnnnnnnnnnnnnnnnnnnnnnnnnnnnnnnnnnnnnnnnnnnnnnnnnnnnnnnnnnnnnnnnnnnnnnnnnnnnnnnnnnnnnnnnnnnnnnnnnnnnnnnnnnnnnnnnnnnnnnnnnnnnnnnnnnnnnnnnnnnnnnnnnnnnnnnnnnnnnnnnnnnnnnnnnnnnnnnnnnnnnnnnnnnnnnnnnnnnnnnnnnnnnnnnnnnnnnnnnnnnnnnnnnnnnnnnnnnnnnnnnnnnnnnnnnnnnnnnnnnnnnnnnnnnnnnnnnnnnnnnnnnnnnnnnnnnnnnnnnnnnnnnnnnnnnnnnnnnnnnnnnnnnnnnnnnnnnnnnnnnnnnnnnnnnnnnnnnnnnnnnnnnnnnnnnnnnnnnnnnnnnnnnnnnnnnnnnnnnnnnnnnnnnnnnnnnnnnnnnnnnnnnnnnnnnnnnnnnnnnnnnnnnnnnnnnnnnnnnnnnnnnnnnnnnnnnnnnnnnnnnnnnnnnnnnnnnnnnnnnnnnnnnnnnnnnnnnnnnnnnnnnnnnnnnnnnnnnnnnnnnnnnnnnnnnnnnnnnnnnnnnnnnnnnnnnnnnnnnnnnnnnnnnnnnnnnnnnnnnnnnnnnnnnnnnnnnnnnnnnnnnnnnnnnnnnnnnnnnnnnnnnnnnnnnnnnnnnnnnnnnnnnnnnnnnnnnnnnnnnnnnnnnnnnnnnnnnnnnnnnnnnnnnnnnnnnnnnnnnnnnnnnnnnnnnnnnnnnnnnnnnnnnnnnnnnnnnnnnnnnnnnnnnnnnnnnnnnnnnnnnnnnnnnnnnnnnnnnnnnnnnnnnnnnnnnnnnnnnnnnnnnnnnnnnnnnnnnnnnnnnnnnnnnnnnnnnnnnnnnnnnnnnnnnnnnnnnnnnnnnnnnnnnnnnnnnnnnnnnnnnnnnnnnnnnnnnnnnnnnnnnnnnnnnnnnnnnnnnnnnnnnnnnnnnnnnnnnnnnnnnnnnnnnnnnnnnnnnnnnnnnnnnnnnnnnnnnnnnnnnnnnnnnnnnnnnnnnnnnnnnnnnnnnnnnnnnnnnnnnnnnnnnnnnnnnnnnnnnnnnnnnnnnnnnnnnnnnnnnnnnnnnnnnnnnnnnnnnnnnnnnnnnnnnnnnnnnnnnnnnnnnnnnnnnnnnnnnnnnnnnnnnnnnnnnnnnnnnnnnnnnnnnnnnnnnnnnnnnnnnnnnnnnnnnnnnnnnnnnnnnnnnnnnnnnnnnnnnnnnnnnnnnnnnnnnnnnnnnnnnnnnnnnnnnnnnnnnnnnnnnnnnnnnnnnnnnnnnnnnnnnnnnnnnnnnnnnnnnnnnnnnnnnnnnnnnnnnnnnnnnnnnnnnnnnnnnnnnnnnnnnnnnnnnnnnnnnnnnnnnnnnnnnnnnnnnnnnnnnnnnnnnnnnnnnnnnnnnnnnnnnnnnnnnnnnnnnnnnnnnnnnnnnnnnnnnnnnnnnnnnnnnnnnnnnnnnnnnnnnnnnnnnnnnnnnnnnnnnnnnnnnnnnnnnnnnnnnnnnnnnnnnnnnnnnnnnnnnnnnnnnnnnnnnnnnnnnnnnnnnnnnnnnnnnnnnnnnnnnnnnnnnnnnnnnnnnnnnnnnnnnnnnnnnnnnnnnnnnnnnnnnnnnnnnnnnnnnnnnnnnnnnnnnnnnnnnnnnnnnnnnnnnnnnnnnnnnnnnnnnnnnnnnnnnnnnnnnnnnnnnnnnnnnnnnnnnnnnnnnnnnnnnnnnnnnnnnnnnnnnnnnnnnnnnnnnnnnnnnnnnnnnnnnnnnnnnnnnnnnnnnnnnnnnnnnnnnnnnnnnnnnnnnnnnnnnnnnnnnnnnnnnnnnnnnnnnnnnnnnnnnnnnnnnnnnnnnnnnnnnnnnnnnnnnnnnnnnnnnnnnnnnnnnnnnnnnnnnnnnnnnnnnnnnnnnnnnnnnnnnnnnnnnnnnnnnnnnnnnnnnnnnnnnnnnnnnnnnnnnnnnnnnnnnnnnnnnnnnnnnnnnnnnnnnnnnnnnnnnnnnnnnnnnnnnnnnnnnnnnnnnnnnnnnnnnnnnnnnnnnnnnnnnnnnnnnnnnnnnnnnnnnnnnnnnnnnnnnnnnnnnnnnnnnnnnnnnnnnnnnnnnnnnnnnnnnnnnnnnnnnnnnnnnnnnnnnnnnnnnnnnnnnnnnnnnnnnnnnnnnnnnnnnnnnnnnnnnnnnnnnnnnnnnnnnnnnnnnnnnnnnnnnnnnnnnnnnnnnnnnnnnnnnnnnnnnnnnnnnnnnnnnnnnnnnnnnnnnnnnnnnnnnnnnnnnnnnnnnnnnnnnnnnnnnnnnnnnnnnnnnnnnnnnnnnnnnnnnnnnnnnnnnnnnnnnnnnnnnnnnnnnnnnnnnnnnnnnnnnnnnnnnnnnnnnnnnnnnnnnnnnnnnnnnnnnnnnnnnnnnnnnnnnnnnnnnnnnnnnnnnnnnnnnnnnnnnnnnnnnnnnnnnnnnnnnnnnnnnnnnnnnnnnnnnnnnnnnnnnnnnnnnnnnnnnnnnnnnnnnnnnnnnnnnnnnnnnnnnnnnnnnnnnnnnnnnnnnnnnnnnnnnnnnnnnnnnnnnnnnnnnnnnnnnnnnnnnnnnnnnnnnnnnnnnnnnnnnnnnnnnnnnnnnnnnnnnnnnnnnnnnnnnnnnnnnnnnnnnnnnnnnnnnnnnnnnnnnnnnnnnnnnnnnnnnnnnnnnnnnnnnnnnnnnnnnnnnnnnnnnnnnnnnnnnnnnnnnnnnnnnnnnnnnnnnnnnnnnnnnnnnnnnnnnnnnnnnnnnnnnnnnnnnnnnnnnnnnnnnnnnnnnnnnnnnnnnnnnnnnnnnnnnnnnnnnnnnnnnnnnnnnnnnnnnnnnnnnnnnnnnnnnnnnnnnnnnnnnnnnnnnnnnnnnnnnnnnnnnnnnnnnnnnnnnnnnnnnnnnnnnnnnnnnnnnnnnnnnnnnnnnnnnnnnnnnnnnnnnnnnnnnnnnnnnnnnnnnnnnnnnnnnnnnnnnnnnnnnnnnnnnnnnnnnnnnnnnnnnnnnnnnnnnnnnnnnnnnnnnnnnnnnnnnnnnnnnnnnnnnnnnnnnnnnnnnnnnnnnnnnnnnnnnnnnnnnnnnnnnnnnnnnnnnnnnnnnnnnnnnnnnnnnnnnnnnnnnnnnnnnnnnnnnnnnnnnnnnnnnnnnnnnnnnnnnnnnnnnnnnnnnnnnnnnnnnnnnnnnnnnnnnnnnnnnnnnnnnnnnnnnnnnnnnnnnnnnnnnnnnnnnnnnnnnnnnnnnnnnnnnnnnnnnnnnnnnnnnnnnnnnnnnnnnnnnnnnnnnnnnnnnnnnnnnnnnnnnnnnnnnnnnnnnnnnnnnnnnnnnnnnnnnnnnnnnnnnnnnnnnnnnnnnnnnnnnnnnnnnnnnnnnnnnnnnnnnnnnnnnnnnnnnnnnnnnnnnnnnnnnnnnnnnnnnnnnnnnnnnnnnnnnnnnnnnnnnnnnnnnnnnnnnnnnnnnnnnnnnnnnnnnnnnnnnnnnnnnnnnnnnnnnnnnnnnnnnnnnnnnnnnnnnnnnnnnnnnnnnnnnnnnnnnnnnnnnnnnnnnnnnnnnnnnnnnnnnnnnnnnnnnnnnnnnnnnnnnnnnnnnnnnnnnnnnnnnnnnnnnnnnnnnnnnnnnnnnnnnnnnnnnnnnnnnnnnnnnnnnnnnnnnnnnnnnnnnnnnnnnnnnnnnnnnnnnnnnnnnnnnnnnnnnnnnnnnnnnnnnnnnnnnnnnnnnnnnnnnnnnnnnnnnnnnnnnnnnnnnnnnnnnnnnnnnnnnnnnnnnnnnnnnnnnnnnnnnnnnnnnnnnnnnnnnnnnnnnnnnnnnnnnnnnnnnnnnnnnnnnnnnnnnnnnnnnnnnnnnnnnnnnnnnnnnnnnnnnnnnnnnnnnnnnnnnnnnnnnnnnnnnnnnnnnnnnnnnnnnnnnnnnnnnnnnnnnnnnnnnnnnnnnnnnnnnnnnnnnnnnnnnnnnnnnnnnnnnnnnnnnnnnnnnnnnnnnnnnnnnnnnnnnnnnnnnnnnnnnnnnnnnnnnnnnnnnnnnnnnnnnnnnnnnnnnnnnnnnnnnnnnnnnnnnnnnnnnnnnnnnnnnnnnnnnnnnnnnnnnnnnnnnnnnnnnnnnnnnnnnnnnnnnnnnnnnnnnnnnnnnnnnnnnnnnnnnnnnnnnnnnnnnnnnnnnnnnnnnnnnnnnnnnnnnnnnnnnnnnnnnnnnnnnnnnnnnnnnnnnnnnnnnnnnnnnnnnnnnnnnnnnnnnnnnnnnnnnnnnnnnnnnnnnnnnnnnnnnnnnnnnnnnnnnnnnnnnnnnnnnnnnnnnnnnnnnnnnnnnnnnnnnnnnnnnnnnnnnnnnnnnnnnnnnnnnnnnnnnnnnnnnnnnnnnnnnnnnnnnnnnnnnnnnnnnnnnnnnnnnnnnnnnnnnnnnnnnnnnnnnnnnnnnnnnnnnnnnnnnnnnnnnnnnnnnnnnnnnnnnnnnnnnnnnnnnnnnnnnnnnnnnnnnnnnnnnnnnnnnnnnnnnnnnnnnnnnnnnnnnnnnnnnnnnnnnnnnnnnnnnnnnnnnnnnnnnnnnnnnnnnnnnnnnnnnnnnnnnnnnnnnnnnnnnnnnnnnnnnnnnnnnnnnnnnnnnnnnnnnnnnnnnnnnnnnnnnnnnnnnnnnnnnnnnnnnnnnnnnnnnnnnnnnnnnnnnnnnnnnnnnnnnnnnnnnnnnnnnnnnnnnnnnnnnnnnnnnnnnnnnnnnnnnnnnnnnnnnnnnnnnnnnnnnnnnnnnnnnnnnnnnnnnnnnnnnnnnnnnnnnnnnnnnnnnnnnnnnnnnnnnnnnnnnnnnnnnnnnnnnnnnnnnnnnnnnnnnnnnnnnnnnnnnnnnnnnnnnnnnnnnnnnnnnnnnnnnnnnnnnnnnnnnnnnnnnnnnnnnnnnnnnnnnnnnnnnnnnnnnnnnnnnnnnnnnnnnnnnnnnnnnnnnnnnnnnnnnnnnnnnnnnnnnnnnnnnnnnnnnnnnnnnnnnnnnnnnnnnnnnnnnnnnnnnnnnnnnnnnnnnnnnnnnnnnnnnnnnnnnnnnnnnnnnnnnnnnnnnnnnnnnnnnnnnnnnnnnnnnnnnnnnnnnnnnnnnnnnnnnnnnnnnnnnnnnnnnnnnnnnnnnnnnnnnnnnnnnnnnnnnnnnnnnnnnnnnnnnnnnnnnnnnnnnnnnnnnnnnnnnnnnnnnnnnnnnnnnnnnnnnnnnnnnnnnnnnnnnnnnnnnnnnnnnnnnnnnnnnnnnnnnnnnnnnnnnnnnnnnnnnnnnnnnnnnnnnnnnnnnnnnnnnnnnnnnnnnnnnnnnnnnnnnnnnnnnnnnnnnnnnnnnnnnnnnnnnnnnnnnnnnnnnnnnnnnnnnnnnnnnnnnnnnnnnnnnnnnnnnnnnnnnnnnnnnnnnnnnnnnnnnnnnnnnnnnnnnnnnnnnnnnnnnnnnnnnnnnnnnnnnnnnnnnnnnnnnnnnnnnnnnnnnnnnnnnnnnnnnnnnnnnnnnnnnnnnnnnnnnnnnnnnnnnnnnnnnnnnnnnnnnnnnnnnnnnnnnnnnnnnnnnnnnnnnnnnnnnnnnnnnnnnnnnnnnnnnnnnnnnnnnnnnnnnnnnnnnnnnnnnnnnnnnnnnnnnnnnnnnnnnnnnnnnnnnnnnnnnnnnnnnnnnnnnnnnnnnnnnnnnnnnnnnnnnnnnnnnnnnnnnnnnnnnnnnnnnnnnnnnnnnnnnnnnnnnnnnnnnnnnnnnnnnnnnnnnnnnnnnnnnnnnnnnnnnnnnnnnnnnnnnnnnnnnnnnnnnnnnnnnnnnnnnnnnnnnnnnnnnnnnnnnnnnnnnnnnnnnnnnnnnnnnnnnnnnnnnnnnnnnnnnnnnnnnnnnnnnnnnnnnnnnnnnnnnnnnnnnnnnnnnnnnnnnnnnnnnnnnnnnnnnnnnnnnnnnnnnnnnnnnnnnnnnnnnnnnnnnnnnnnnnnnnnnnnnnnnnnnnnnnnnnnnnnnnnnnnnnnnnnnnnnnnnnnnnnnnnnnnnnnnnnnnnnnnnnnnnnnnnnnnnnnnnnnnnnnnnnnnnnnnnnnnnnnnnnnnnnnnnnnnnnnnnnnnnnnnnnnnnnnnnnnnnnnnnnnnnnnnnnnnnnnnnnnnnnnnnnnnnnnnnnnnnnnnnnnnnnnnnnnnnnnnnnnnnnnnnnnnnnnnnnnnnnnnnnnnnnnnnnnnnnnnnnnnnnnnnnnnnnnnnnnnnnnnnnnnnnnnnnnnnnnnnnnnnnnnnnnnnnnnnnnnnnnnnnnnnnnnnnnnnnnnnnnnnnnnnnnnnnnnnnnnnnnnnnnnnnnnnnnnnnnnnnnnnnnnnnnnnnnnnnnnnnnnnnnnnnnnnnnnnnnnnnnnnnnnnnnnnnnnnnnnnnnnnnnnnnnnnnnnnnnnnnnnnnnnnnnnnnnnnnnnnnnnnnnnnnnnnnnnnnnnnnnnnnnnnnnnnnnnnnnnnnnnnnnnnnnnnnnnnnnnnnnnnnnnnnnnnnnnnnnnnnnnnnnnnnnnnnnnnnnnnnnnnnnnnnnnnnnnnnnnnnnnnnnnnnnnnnnnnnnnnnnnnnnnnnnnnnnnnnnnnnnnnnnnnnnnnnnnnnnnnnnnnnnnnnnnnnnnnnnnnnnnnnnnnnnnnnnnnnnnnnnnnnnnnnnnnnnnnnnnnnnnnnnnnnnnnnnnnnnnnnnnnnnnnnnnnnnnnnnnnnnnnnnnnnnnnnnnnnnnnnnnnnnnnnnnnnnnnnnnnnnnnnnnnnnnnnnnnnnnnnnnnnnnnnnnnnnnnnnnnnnnnnnnnnnnnnnnnnnnnnnnnnnnnnnnnnnnnnnnnnnnnnnnnnnnnnnnnnnnnnnnnnnnnnnnnnnnnnnnnnnnnnnnnnnnnnnnnnnnnnnnnnnnnnnnnnnnnnnnnnnnnnnnnnnnnnnnnnnnnnnnnnnnnnnnnnnnnnnnnnnnnnnnnnnnnnnnnnnnnnnnnnnnnnnnnnnnnnnnnnnnnnnnnnnnnnnnnnnnnnnnnnnnnnnnnnnnnnnnnnnnnnnnnnnnnnnnnnnnnnnnnnnnnnnnnnnnnnnnnnnnnnnnnnnnnnnnnnnnnnnnnnnnnnnnnnnnnnnnnnnnnnnnnnnnnnnnnnnnnnnnnnnnnnnnnnnnnnnnnnnnnnnnnnnnnnnnnnnnnnnnnnnnnnnnnnnnnnnnnnnnnnnnnnnnnnnnnnnnnnnnnnnnnnnnnnnnnnnnnnnnnnnnnnnnnnnnnnnnnnnnnnnnnnnnnnnnnnnnnnnnnnnnnnnnnnnnnnnnnnnnnnnnnnnnnnnnnnnnnnnnnnnnnnnnnnnnnnnnnnnnnnnnnnnnnnnnnnnnnnnnnnnnnnnnnnnnnnnnnnnnnnnnnnnnnnnnnnnnnnnnnnnnnnnnnnnnnnnnnnnnnnnnnnnnnnnnnnnnnnnnnnnnnnnnnnnnnnnnnnnnnnnnnnnnnnnnnnnnnnnnnnnnnnnnnnnnnnnnnnnnnnnnnnnnnnnnnnnnnnnnnnnnnnnnnnnnnnnnnnnnnnnnnnnnnnnnnnnnnnnnnnnnnnnnnnnnnnnnnnnnnnnnnnnnnnnnnnnnnnnnnnnnnnnnnnnnnnnnnnnnnnnnnnnnnnnnnnnnnnnnnnnnnnnnnnnnnnnnnnnnnnnnnnnnnnnnnnnnnnnnnnnnnnnnnnnnnnnnnnnnnnnnnnnnnnnnnnnnnnnnnnnnnnnnnnnnnnnnnnnnnnnnnnnnnnnnnnnnnnnnnnnnnnnnnnnnnnnnnnnnnnnnnnnnnnnnnnnnnnnnnnnnnnnnnnnnnnnnnnnnnnnnnnnnnnnnnnnnnnnnnnnnnnnnnnnnnnnnnnnnnnnnnnnnnnnnnnnnnnnnnnnnnnnnnnnnnnnnnnnnnnnnnnnnnnnnnnnnnnnnnnnnnnnnnnnnnnnnnnnnnnnnnnnnnnnnnnnnnnnnnnnnnnnnnnnnnnnnnnnnnnnnnnnnnnnnnnnnnnnnnnnnnnnnnnnnnnnnnnnnnnnnnnnnnnnnnnnnnnnnnnnnnnnnnnnnnnnnnnnnnnnnnnnnnnnnnnnnnnnnnnnnnnnnnnnnnnnnnnnnnnnnnnnnnnnnnnnnnnnnnnnnnnnnnnnnnnnnnnnnnnnnnnnnnnnnnnnnnnnnnnnnnnnnnnnnnnnnnnnnnnnnnnnnnnnnnnnnnnnnnnnnnnnnnnnnnnnnnnnnnnnnnnnnnnnnnnnnnnnnnnnnnnnnnnnnnnnnnnnnnnnnnnnnnnnnnnnnnnnnnnnnnnnnnnnnnnnnnnnnnnnnnnnnnnnnnnnnnnnnnnnnnnnnnnnnnnnnnnnnnnnnnnnnnnnnnnnnnnnnnnnnnnnnnnnnnnnnnnnnnnnnnnnnnnnnnnnnnnnnnnnnnnnnnnnnnnnnnnnnnnnnnnnnnnnnnnnnnnnnnnnnnnnnnnnnnnnnnnnnnnnnnnnnnnnnnnnnnnnnnnnnnnnnnnnnnnnnnnnnnnnnnnnnnnnnnnnnnnnnnnnnnnnnnnnnnnnnnnnnnnnnnnnnnnnnnnnnnnnnnnnnnnnnnnnnnnnnnnnnnnnnnnnnnnnnnnnnnnnnnnnnnnnnnnnnnnnnnnnnnnnnnnnnnnnnnnnnnnnnnnnnnnnnnnnnnnnnnnnnnnnnnnnnnnnnnnnnnnnnnnnnnnnnnnnnnnnnnnnnnnnnnnnnnnnnnnnnnnnnnnnnnnnnnnnnnnnnnnnnnnnnnnnnnnnnnnnnnnnnnnnnnnnnnnnnnnnnnnnnnnnnnnnnnnnnnnnnnnnnnnnnnnnnnnnnnnnnnnnnnnnnnnnnnnnnnnnnnnnnnnnnnnnnnnnnnnnnnnnnnnnnnnnnnnnnnnnnnnnnnnnnnnnnnnnnnnnnnnnnnnnnnnnnnnnnnnnnnnnnnnnnnnnnnnnnnnnnnnnnnnnnnnnnnnnnnnnnnnnnnnnnnnnnnnnnnnnnnnnnnnnnnnnnnnnnnnnnnnnnnnnnnnnnnnnnnnnnnnnnnnnnnnnnnnnnnnnnnnnnnnnnnnnnnnnnnnnnnnnnnnnnnnnnnnnnnnnnnnnnnnnnnnnnnnnnnnnnnnnnnnnnnnnnnnnnnnnnnnnnnnnnnnnnnnnnnnnnnnnnnnnnnnnnnnnnnnnnnnnnnnnnnnnnnnnnnnnnnnnnnnnnnnnnnnnnnnnnnnnnnnnnnnnnnnnnnnnnnnnnnnnnnnnnnnnnnnnnnnnnnnnnnnnnnnnnnnnnnnnnnnnnnnnnnnnnnnnnnnnnnnnnnnnnnnnnnnnnnnnnnnnnnnnnnnnnnnnnnnnnnnnnnnnnnnnnnnnnnnnnnnnnnnnnnnnnnnnnnnnnnnnnnnnnnnnnnnnnnnnnnnnnnnnnnnnnnnnnnnnnnnnnnnnnnnnnnnnnnnnnnnnnnnnnnnnnnnnnnnnnnnnnnnnnnnnnnnnnnnnnnnnnnnnnnnnnnnnnnnnnnnnnnnnnnnnnnnnnnnnnnnnnnnnnnnnnnnnnnnnnnnnnnnnnnnnnnnnnnnnnnnnnnnnnnnnnnnnnnnnnnnnnnnnnnnnnnnnnnnnnnnnnnnnnnnnnnnnnnnnnnnnnnnnnnnnnnnnnnnnnnnnnnnnnnnnnnnnnnnnnnnnnnnnnnnnnnnnnnnnnnnnnnnnnnnnnnnnnnnnnnnnnnnnnnnnnnnnnnnnnnnnnnnnnnnnnnnnnnnnnnnnnnnnnnnnnnnnnnnnnnnnnnnnnnnnnnnnnnnnnnnnnnnnnnnnnnnnnnnnnnnnnnnnnnnnnnnnnnnnnnnnnnnnnnnnnnnnnnnnnnnnnnnnnnnnnnnnnnnnnnnnnnnnnnnnnnnnnnnnnnnnnnnnnnnnnnnnnnnnnnnnnnnnnnnnnnnnnnnnnnnnnnnnnnnnnnnnnnnnnnnnnnnnnnnnnnnnnnnnnnnnnnnnnnnnnnnnnnnnnnnnnnnnnnnnnnnnnnnnnnnnnnnnnnnnnnnnnnnnnnnnnnnnnnnnnnnnnnnnnnnnnnnnnnnnnnnnnnnnnnnnnnnnnnnnnnnnnnnnnnnnnnnnnnnnnnnnnnnnnnnnnnnnnnnnnnnnnnnnnnnnnnnnnnnnnnnnnnnnnnnnnnnnnnnnnnnnnnnnnnnnnnnnnnnnnnnnnnnnnnnnnnnnnnnnnnnnnnnnnnnnnnnnnnnnnnnnnnnnnnnnnnnnnnnnnnnnnnnnnnnnnnnnnnnnnnnnnnnnnnnnnnnnnnnnnnnnnnnnnnnnnnnnnnnnnnnnnnnnnnnnnnnnnnnnnnnnnnnnnnnnnnnnnnnnnnnnnnnnnnnnnnnnnnnnnnnnnnnnnnnnnnnnnnnnnnnnnnnnnnnnnnnnnnnnnnnnnnnnnnnnnnnnnnnnnnnnnnnnnnnnnnnnnnnnnnnnnnnnnnnnnnnnnnnnnnnnnnnnnnnnnnnnnnnnnnnnnnnnnnnnnnnnnnnnnnnnnnnnnnnnnnnnnnnnnnnnnnnnnnnnnnnnnnnnnnnnnnnnnnnnnnnnnnnnnnnnnnnnnnnnnnnnnnnnnnnnnnnnnnnnnnnnnnnnnnnnnnnnnnnnnnnnnnnnnnnnnnnnnnnnnnnnnnnnnnnnnnnnnnnnnnnnnnnnnnnnnnnnnnnnnnnnnnnnnnnnnnnnnnnnnnnnnnnnnnnnnnnnnnnnnnnnnnnnnnnnnnnnnnnnnnnnnnnnnnnnnnnnnnnnnnnnnnnnnnnnnnnnnnnnnnnnnnnnnnnnnnnnnnnnnnnnnnnnnnnnnnnnnnnnnnnnnnnnnnnnnnnnnnnnnnnnnnnnnnnnnnnnnnnnnnnnnnnnnnnnnnnnnnnnnnnnnnnnnnnnnnnnnnnnnnnnnnnnnnnnnnnnnnnnnnnnnnnnnnnnnnnnnnnnnnnnnnnnnnnnnnnnnnnnnnnnnnnnnnnnnnnnnnnnnnnnnnnnnnnnnnnnnnnnnnnnnnnnnnnnnnnnnnnnnnnnnnnnnnnnnnnnnnnnnnnnnnnnnnnnnnnnnnnnnnnnnnnnnnnnnnnnnnnnnnnnnnnnnnnnnnnnnnnnnnnnnnnnnnnnnnnnnnnnnnnnnnnnnnnnnnnnnnnnnnnnnnnnnnnnnnnnnnnnnnnnnnnnnnnnnnnnnnnnnnnnnnnnnnnnnnnnnnnnnnnnnnnnnnnnnnnnnnnnnnnnnnnnnnnnnnnnnnnnnnnnnnnnnnnnnnnnnnnnnnnnnnnnnnnnnnnnnnnnnnnnnnnnnnnnnnnnnnnnnnnnnnnnnnnnnnnnnnnnnnnnnnnnnnnnnnnnnnnnnnnnnnnnnnnnnnnnnnnnnnnnnnnnnnnnnnnnnnnnnnnnnnnnnnnnnnnnnnnnnnnnnnnnnnnnnnnnnnnnnnnnnnnnnnnnnnnnnnnnnnnnnnnnnnnnnnnnnnnnnnnnnnnnnnnnnnnnnnnnnnnnnnnnnnnnnnnnnnnnnnnnnnnnnnnnnnnnnnnnnnnnnnnnnnnnnnnnnnnnnnnnnnnnnnnnnnnnnnnnnnnnnnnnnnnnnnnnnnnnnnnnnnnnnnnnnnnnnnnnnnnnnnnnnnnnnnnnnnnnnnnnnnnnnnnnnnnnnnnnnnnnnnnnnnnnnnnnnnnnnnnnnnnnnnnnnnnnnnnnnnnnnnnnnnnnnnnnnnnnnnnnnnnnnnnnnnnnnnnnnnnnnnnnnnnnnnnnnnnnnnnnnnnnnnnnnnnnnnnnnnnnnnnnnnnnnnnnnnnnnnnnnnnnnnnnnnnnnnnnnnnnnnnnnnnnnnnnnnnnnnnnnnnnnnnnnnnnnnnnnnnnnnnnnnnnnnnnnnnnnnnnnnnnnnnnnnnnnnnnnnnnnnnnnnnnnnnnnnnnnnnnnnnnnnnnnnnnnnnnnnnnnnnnnnnnnnnnnnnnnnnnnnnnnnnnnnnnnnnnnnnnnnnnnnnnnnnnnnnnnnnnnnnnnnnnnnnnnnnnnnnnnnnnnnnnnnnnnnnnnnnnnnnnnnnnnnnnnnnnnnnnnnnnnnnnnnnnnnnnnnnnnnnnnnnnnnnnnnnnnnnnnnnnnnnnnnnnnnnnnnnnnnnnnnnnnnnnnnnnnnnnnnnnnnnnnnnnnnnnnnnnnnnnnnnnnnnnnnnnnnnnnnnnnnnnnnnnnnnnnnnnnnnnnnnnnnnnnnnnnnnnnnnnnnnnnnnnnnnnnnnnnnnnnnnnnnnnnnnnnnnnnnnnnnnnnnnnnnnnnnnnnnnnnnnnnnnnnnnnnnnnnnnnnnnnnnnnnnnnnnnnnnnnnnnnnnnnnnnnnnnnnnnnnnnnnnnnnnnnnnnnnnnnnnnnnnnnnnnnnnnnnnnnnnnnnnnnnnnnnnnnnnnnnnnnnnnnnnnnnnnnnnnnnnnnnnnnnnnnnnnnnnnnnnnnnnnnnnnnnnnnnnnnnnnnnnnnnnnnnnnnnnnnnnnnnnnnnnnnnnnnnnnnnnnnnnnnnnnnnnnnnnnnnnnnnnnnnnnnnnnnnnnnnnnnnnnnnnnnnnnnnnnnnnnnnnnnnnnnnnnnnnnnnnnnnnnnnnnnnnnnnnnnnnnnnnnnnnnnnnnnnnnnnnnnnnnnnnnnnnnnnnnnnnnnnnnnnnnnnnnnnnnnnnnnnnnnnnnnnnnnnnnnnnnnnnnnnnnnnnnnnnnnnnnnnnnnnnnnnnnnnnnnnnnnnnnnnnnnnnnnnnnnnnnnnnnnnnnnnnnnnnnnnnnnnnnnnnnnnnnnnnnnnnnnnnnnnnnnnnnnnnnnnnnnnnnnnnnnnnnnnnnnnnnnnnnnnnnnnnnnnnnnnnnnnnnnnnnnnnnnnnnnnnnnnnnnnnnnnnnnnnnnnnnnnnnnnnnnnnnnnnnnnnnnnnnnnnnnnnnnnnnnnnnnnnnnnnnnnnnnnnnnnnnnnnnnnnnnnnnnnnnnnnnnnnnnnnnnnnnnnnnnnnnnnnnnnnnnnnnnnnnnnnnnnnnnnnnnnnnnnnnnnnnnnnnnnnnnnnnnnnnnnnnnnnnnnnnnnnnnnnnnnnnnnnnnnnnnnnnnnnnnnnnnnnnnnnnnnnnnnnnnnnnnnnnnnnnnnnnnnnnnnnnnnnnnnnnnnnnnnnnnnnnnnnnnnnnnnnnnnnnnnnnnnnnnnnnnnnnnnnnnnnnnnnnnnnnnnnnnnnnnnnnnnnnnnnnnnnnnnnnnnnnnnnnnnnnnnnnnnnnnnnnnnnnnnnnnnnnnnnnnnnnnnnnnnnnnnnnnnnnnnnnnnnnnnnnnnnnnnnnnnnnnnnnnnnnnnnnnnnnnnnnnnnnnnnnnnnnnnnnnnnnnnnnnnnnnnnnnnnnnnnnnnnnnnnnnnnnnnnnnnnnnnnnnnnnnnnnnnnnnnnnnnnnnnnnnnnnnnnnnnnnnnnnnnnnnnnnnnnnnnnnnnnnnnnnnnnnnnnnnnnnnnnnnnnnnnnnnnnnnnnnnnnnnnnnnnnnnnnnnnnnnnnnnnnnnnnnnnnnnnnnnnnnnnnnnnnnnnnnnnnnnnnnnnnnnnnnnnnnnnnnnnnnnnnnnnnnnnnnnnnnnnnnnnnnnnnnnnnnnnnnnnnnnnnnnnnnnnnnnnnnnnnnnnnnnnnnnnnnnnnnnnnnnnnnnnnnnnnnnnnnnnnnnnnnnnnnnnnnnnnnnnnnnnnnnnnnnnnnnnnnnnnnnnnnnnnnnnnnnnnnnnnnnnnnnnnnnnnnnnnnnnnnnnnnnnnnnnnnnnnnnnnnnnnnnnnnnnnnnnnnnnnnnnnnnnnnnnnnnnnnnnnnnnnnnnnnnnnnnnnnnnnnnnnnnnnnnnnnnnnnnnnnnnnnnnnnnnnnnnnnnnnnnnnnnnnnnnnnnnnnnnnnnnnnnnnnnnnnnnnnnnnnnnnnnnnnnnnnnnnnnnnnnnnnnnnnnnnnnnnnnnnnnnnnnnnnnnnnnnnnnnnnnnnnnnnnnnnnnnnnnnnnnnnnnnnnnnnnnnnnnnnnnnnnnnnnnnnnnnnnnnnnnnnnnnnnnnnnnnnnnnnnnnnnnnnnnnnnnnnnnnnnnnnnnnnnnnnnnnnnnnnnnnnnnnnnnnnnnnnnnnnnnnnnnnnnnnnnnnnnnnnnnnnnnnnnnnnnnnnnnnnnnnnnnnnnnnnnnnnnnnnnnnnnnnnnnnnnnnnnnnnnnnnnnnnnnnnnnnnnnnnnnnnnnnnnnnnnnnnnnnnnnnnnnnnnnnnnnnnnnnnnnnnnnnnnnnnnnnnnnnnnnnnnnnnnnnnnnnnnnnnnnnnnnnnnnnnnnnnnnnnnnnnnnnnnnnnnnnnnnnnnnnnnnnnnnnnnnnnnnnnnnnnnnnnnnnnnnnnnnnnnnnnnnnnnnnnnnnnnnnnnnnnnnnnnnnnnnnnnnnnnnnnnnnnnnnnnnnnnnnnnnnnnnnnnnnnnnnnnnnnnnnnnnnnnnnnnnnnnnnnnnnnnnnnnnnnnnnnnnnnnnnnnnnnnnnnnnnnnnnnnnnnnnnnnnnnnnnnnnnnnnnnnnnnnnnnnnnnnnnnnnnnnnnnnnnnnnnnnnnnnnnnnnnnnnnnnnnnnnnnnnnnnnnnnnnnnnnnnnnnnnnnnnnnnnnnnnnnnnnnnnnnnnnnnnnnnnnnnnnnnnnnnnnnnnnnnnnnnnnnnnnnnnnnnnnnnnnnnnnnnnnnnnnnnnnnnnnnnnnnnnnnnnnnnnnnnnnnnnnnnnnnnnnnnnnnnnnnnnnnnnnnnnnnnnnnnnnnnnnnnnnnnnnnnnnnnnnnnnnnnnnnnnnnnnnnnnnnnnnnnnnnnnnnnnnnnnnnnnnnnnnnnnnnnnnnnnnnnnnnnnnnnnnnnnnnnnnnnnnnnnnnnnnnnnnnnnnnnnnnnnnnnnnnnnnnnnnnnnnnnnnnnnnnnnnnnnnnnnnnnnnnnnnnnnnnnnnnnnnnnnnnnnnnnnnnnnnnnnnnnnnnnnnnnnnnnnnnnnnnnnnnnnnnnnnnnnnnnnnnnnnnnnnnnnnnnnnnnnnnnnnnnnnnnnnnnnnnnnnnnnnnnnnnnnnnnnnnnnnnnnnnnnnnnnnnnnnnnnnnnnnnnnnnnnnnnnnnnnnnnnnnnnnnnnnnnnnnnnnnnnnnnnnnnnnnnnnnnnnnnnnnnnnnnnnnnnnnnnnnnnnnnnnnnnnnnnnnnnnnnnnnnnnnnnnnnnnnnnnnnnnnnnnnnnnnnnnnnnnnnnnnnnnnnnnnnnnnnnnnnnnnnnnnnnnnnnnnnnnnnnnnnnnnnnnnnnnnnnnnnnnnnnnnnnnnnnnnnnnnnnnnnnnnnnnnnnnnnnnnnnnnnnnnnnnnnnnnnnnnnnnnnnnnnnnnnnnnnnnnnnnnnnnnnnnnnnnnnnnnnnnnnnnnnnnnnnnnnnnnnnnnnnnnnnnnnnnnnnnnnnnnnnnnnnnnnnnnnnnnnnnnnnnnnnnnnnnnnnnnnnnnnnnnnnnnnnnnnnnnnnnnnnnnnnnnnnnnnnnnnnnnnnnnnnnnnnnnnnnnnnnnnnnnnnnnnnnnnnnnnnnnnnnnnnnnnnnnnnnnnnnnnnnnnnnnnnnnnnnnnnnnnnnnnnnnnnnnnnnnnnnnnnnnnnnnnnnnnnnnnnnnnnnnnnnnnnnnnnnnnnnnnnnnnnnnnnnnnnnnnnnnnnnnnnnnnnnnnnnnnnnnnnnnnnnnnnnnnnnnnnnnnnnnnnnnnnnnnnnnnnnnnnnnnnnnnnnnnnnnnnnnnnnnnnnnnnnnnnnnnnnnnnnnnnnnnnnnnnnnnnnnnnnnnnnnnnnnnnnnnnnnnnnnnnnnnnnnnnnnnnnnnnnnnnnnnnnnnnnnnnnnnnnnnnnnnnnnnnnnnnnnnnnnnnnnnnnnnnnnnnnnnnnnnnnnnnnnnnnnnnnnnnnnnnnnnnnnnnnnnnnnnnnnnnnnnnnnnnnnnnnnnnnnnnnnnnnnnnnnnnnnnnnnnnnnnnnnnnnnnnnnnnnnnnnnnnnnnnnnnnnnnnnnnnnnnnnnnnnnnnnnnnnnnnnnnnnnnnnnnnnnnnnnnnnnnnnnnnnnnnnnnnnnnnnnnnnnnnnnnnnnnnnnnnnnnnnnnnnnnnnnnnnnnnnnnnnnnnnnnnnnnnnnnnnnnnnnnnnnnnnnnnnnnnnnnnnnnnnnnnnnnnnnnnnnnnnnnnnnnnnnnnnnnnnnnnnnnnnnnnnnnnnnnnnnnnnnnnnnnnnnnnnnnnnnnnnnnnnnnnnnnnnnnnnnnnnnnnnnnnnnnnnnnnnnnnnnnnnnnnnnnnnnnnnnnnnnnnnnnnnnnnnnnnnnnnnnnnnnnnnnnnnnnnnnnnnnnnnnnnnnnnnnnnnnnnnnnnnnnnnnnnnnnnnnnnnnnnnnnnnnnnnnnnnnnnnnnnnnnnnnnnnnnnnnnnnnnnnnnnnnnnnnnnnnnnnnnnnnnnnnnnnnnnnnnnnnnnnnnnnnnnnnnnnnnnnnnnnnnnnnnnnnnnnnnnnnnnnnnnnnnnnnnnnnnnnnnnnnnnnnnnnnnnnnnnnnnnnnnnnnnnnnnnnnnnnnnnnnnnnnnnnnnnnnnnnnnnnnnnnnnnnnnnnnnnnnnnnnnnnnnnnnnnnnnnnnnnnnnnnnnnnnnnnnnnnnnnnnnnnnnnnnnnnnnnnnnnnnnnnnnnnnnnnnnnnnnnnnnnnnnnnnnnnnnnnnnnnnnnnnnnnnnnnnnnnnnnnnnnnnnnnnnnnnnnnnnnnnnnnnnnnnnnnnnnnnnnnnnnnnnnnnnnnnnnnnnnnnnnnnnnnnnnnnnnnnnnnnnnnnnnnnnnnnnnnnnnnnnnnnnnnnnnnnnnnnnnnnnnnnnnnnnnnnnnnnnnnnnnnnnnnnnnnnnnnnnnnnnnnnnnnnnnnnnnnnnnnnnnnnnnnnnnnnnnnnnnnnnnnnnnnnnnnnnnnnnnnnnnnnnnnnnnnnnnnnnnnnnnnnnnnnnnnnnnnnnnnnnnnnnnnnnnnnnnnnnnnnnnnnnnnnnnnnnnnnnnnnnnnnnnnnnnnnnnnnnnnnnnnnnnnnnnnnnnnnnnnnnnnnnnnnnnnnnnnnnnnnnnnnnnnnnnnnnnnnnnnnnnnnnnnnnnnnnnnnnnnnnnnnnnnnnnnnnnnnnnnnnnnnnnnnnnnnnnnnnnnnnnnnnnnnnnnnnnnnnnnnnnnnnnnnnnnnnnnnnnnnnnnnnnnnnnnnnnnnnnnnnnnnnnnnnnnnnnnnnnnnnnnnnnnnnnnnnnnnnnnnnnnnnnnnnnnnnnnnnnnnnnnnnnnnnnnnnnnnnnnnnnnnnnnnnnnnnnnnnnnnnnnnnnnnnnnnnnnnnnnnnnnnnnnnnnnnnnnnnnnnnnnnnnnnnnnnnnnnnnnnnnnnnnnnnnnnnnnnnnnnnnnnnnnnnnnnnnnnnnnnnnnnnnnnnnnnnnnnnnnnnnnnnnnnnnnnnnnnnnnnnnnnnnnnnnnnnnnnnnnnnnnnnnnnnnnnnnnnnnnnnnnnnnnnnnnnnnnnnnnnnnnnnnnnnnnnnnnnnnnnnnnnnnnnnnnnnnnnnnnnnnnnnnnnnnnnnnnnnnnnnnnnnnnnnnnnnnnnnnnnnnnnnnnnnnnnnnnnnnnnnnnnnnnnnnnnnnnnnnnnnnnnnnnnnnnnnnnnnnnnnnnnnnnnnnnnnnnnnnnnnnnnnnnnnnnnnnnnnnnnnnnnnnnnnnnnnnnnnnnnnnnnnnnnnnnnnnnnnnnnnnnnnnnnnnnnnnnnnnnnnnnnnnnnnnnnnnnnnnnnnnnnnnnnnnnnnnnnnnnnnnnnnnnnnnnnnnnnnnnnnnnnnnnnnnnnnnnnnnnnnnnnnnnnnnnnnnnnnnnnnnnnnnnnnnnnnnnnnnnnnnnnnnnnnnnnnnnnnnnnnnnnnnnnnnnnnnnnnnnnnnnnnnnnnnnnnnnnnnnnnnnnnnnnnnnnnnnnnnnnnnnnnnnnnnnnnnnnnnnnnnnnnnnnnnnnnnnnnnnnnnnnnnnnnnnnnnnnnnnnnnnnnnnnnnnnnnnnnnnnnnnnnnnnnnnnnnnnnnnnnnnnnnnnnnnnnnnnnnnnnnnnnnnnnnnnnnnnnnnnnnnnnnnnnnnnnnnnnnnnnnnnnnnnnnnnnnnnnnnnnnnnnnnnnnnnnnnnnnnnnnnnnnnnnnnnnnnnnnnnnnnnnnnnnnnnnnnnnnnnnnnnnnnnnnnnnnnnnnnnnnnnnnnnnnnnnnnnnnnnnnnnnnnnnnnnnnnnnnnnnnnnnnnnnnnnnnnnnnnnnnnnnnnnnnnnnnnnnnnnnnnnnnnnnnnnnnnnnnnnnnnnnnnnnnnnnnnnnnnnnnnnnnnnnnnnnnnnnnnnnnnnnnnnnnnnnnnnnnnnnnnnnnnnnnnnnnnnnnnnnnnnnnnnnnnnnnnnnnnnnnnnnnnnnnnnnnnnnnnnnnnnnnnnnnnnnnnnnnnnnnnnnnnnnnnnnnnnnnnnnnnnnnnnnnnnnnnnnnnnnnnnnnnnnnnnnnnnnnnnnnnnnnnnnnnnnnnnnnnnnnnnnnnnnnnnnnnnnnnnnnnnnnnnnnnnnnnnnnnnnnnnnnnnnnnnnnnnnnnnnnnnnnnnnnnnnnnnnnnnnnnnnnnnnnnnnnnnnnnnnnnnnnnnnnnnnnnnnnnnnnnnnnnnnnnnnnnnnnnnnnnnnnnnnnnnnnnnnnnnnnnnnnnnnnnnnnnnnnnnnnnnnnnnnnnnnnnnnnnnnnnnnnnnnnnnnnnnnnnnnnnnnnnnnnnnnnnnnnnnnnnnnnnnnnnnnnnnnnnnnnnnnnnnnnnnnnnnnnnnnnnnnnnnnnnnnnnnnnnnnnnnnnnnnnnnnnnnnnnnnnnnnnnnnnnnnnnnnnnnnnnnnnnnnnnnnnnnnnnnnnnnnnnnnnnnnnnnnnnnnnnnnnnnnnnnnnnnnnnnnnnnnnnnnnnnnnnnnnnnnnnnnnnnnnnnnnnnnnnnnnnnnnnnnnnnnnnnnnnnnnnnnnnnnnnnnnnnnnnnnnnnnnnnnnnnnnnnnnnnnnnnnnnnnnnnnnnnnnnnnnnnnnnnnnnnnnnnnnnnnnnnnnnnnnnnnnnnnnnnnnnnnnnnnnnnnnnnnnnnnnnnnnnnnnnnnnnnnnnnnnnnnnnnnnnnnnnnnnnnnnnnnnnnnnnnnnnnnnnnnnnnnnnnnnnnnnnnnnnnnnnnnnnnnnnnnnnnnnnnnnnnnnnnnnnnnnnnnnnnnnnnnnnnnnnnnnnnnnnnnnnnnnnnnnnnnnnnnnnnnnnnnnnnnnnnnnnnnnnnnnnnnnnnnnnnnnnnnnnnnnnnnnnnnnnnnnnnnnnnnnnnnnnnnnnnnnnnnnnnnnnnnnnnnnnnnnnnnnnnnnnnnnnnnnnnnnnnnnnnnnnnnnnnnnnnnnnnnnnnnnnnnnnnnnnnnnnnnnnnnnnnnnnnnnnnnnnnnnnnnnnnnnnnnnnnnnnnnnnnnnnnnnnnnnnnnnnnnnnnnnnnnnnnnnnnnnnnnnnnnnnnnnnnnnnnnnnnnnnnnnnnnnnnnnnnnnnnnnnnnnnnnnnnnnnnnnnnnnnnnnnnnnnnnnnnnnnnnnnnnnnnnnnnnnnnnnnnnnnnnnnnnnnnnnnnnnnnnnnnnnnnnnnnnnnnnnnnnnnnnnnnnnnnnnnnnnnnnnnnnnnnnnnnnnnnnnnnnnnnnnnnnnnnnnnnnnnnnnnnnnnnnnnnnnnnnnnnnnnnnnnnnnnnnnnnnnnnnnnnnnnnnnnnnnnnnnnnnnnnnnnnnnnnnnnnnnnnnnnnnnnnnnnnnnnnnnnnnnnnnnnnnnnnnnnnnnnnnnnnnnnnnnnnnnnnnnnnnnnnnnnnnnnnnnnnnnnnnnnnnnnnnnnnnnnnnnnnnnnnnnnnnnnnnnnnnnnnnnnnnnnnnnnnnnnnnnnnnnnnnnnnnnnnnnnnnnnnnnnnnnnnnnnnnnnnnnnnnnnnnnnnnnnnnnnnnnnnnnnnnnnnnnnnnnnnnnnnnnnnnnnnnnnnnnnnnnnnnnnnnnnnnnnnnnnnnnnnnnnnnnnnnnnnnnnnnnnnnnnnnnnnnnnnnnnnnnnnnnnnnnnnnnnnnnnnnnnnnnnnnnnnnnnnnnnnnnnnnnnnnnnnnnnnnnnnnnnnnnnnnnnnnnnnnnnnnnnnnnnnnnnnnnnnnnnnnnnnnnnnnnnnnnnnnnnnnnnnnnnnnnnnnnnnnnnnnnnnnnnnnnnnnnnnnnnnnnnnnnnnnnnnnnnnnnnnnnnnnnnnnnnnnnnnnnnnnnnnnnnnnnnnnnnnnnnnnnnnnnnnnnnnnnnnnnnnnnnnnnnnnnnnnnnnnnnnnnnnnnnnnnnnnnnnnnnnnnnnnnnnnnnnnnnnnnnnnnnnnnnnnnnnnnnnnnnnnnnnnnnnnnnnnnnnnnnnnnnnnnnnnnnnnnnnnnnnnnnnnnnnnnnnnnnnnnnnnnnnnnnnnnnnnnnnnnnnnnnnnnnnnnnnnnnnnnnnnnnnnnnnnnnnnnnnnnnnnnnnnnnnnnnnnnnnnnnnnnnnnnnnnnnnnnnnnnnnnnnnnnnnnnnnnnnnnnnnnnnnnnnnnnnnnnnnnnnnnnnnnnnnnnnnnnnnnnnnnnnnnnnnnnnnnnnnnnnnnnnnnnnnnnnnnnnnnnnnnnnnnnnnnnnnnnnnnnnnnnnnnnnnnnnnnnnnnnnnnnnnnnnnnnnnnnnnnnnnnnnnnnnnnnnnnnnnnnnnnnnnnnnnnnnnnnnnnnnnnnnnnnnnnnnnnnnnnnnnnnnnnnnnnnnnnnnnnnnnnnnnnnnnnnnnnnnnnnnnnnnnnnnnnnnnnnnnnnnnnnnnnnnnnnnnnnnnnnnnnnnnnnnnnnnnnnnnnnnnnnnnnnnnnnnnnnnnnnnnnnnnnnnnnnnnnnnnnnnnnnnnnnnnnnnnnnnnnnnnnnnnnnnnnnnnnnnnnnnnnnnnnnnnnnnnnnnnnnnnnnnnnnnnnnnnnnnnnnnnnnnnnnnnnnnnnnnnnnnnnnnnnnnnnnnnnnnnnnnnnnnnnnnnnnnnnnnnnnnnnnnnnnnnnnnnnnnnnnnnnnnnnnnnnnnnnnnnnnnnnnnnnnnnnnnnnnnnnnnnnnnnnnnnnnnnnnnnnnnnnnnnnnnnnnnnnnnnnnnnnnnnnnnnnnnnnnnnnnnnnnnnnnnnnnnnnnnnnnnnnnnnnnnnnnnnnnnnnnnnnnnnnnnnnnnnnnnnnnnnnnnnnnnnnnnnnnnnnnnnnnnnnnnnnnnnnnnnnnnnnnnnnnnnnnnnnnnnnnnnnnnnnnnnnnnnnnnnnnnnnnnnnnnnnnnnnnnnnnnnnnnnnnnnnnnnnnnnnnnnnnnnnnnnnnnnnnnnnnnnnnnnnnnnnnnnnnnnnnnnnnnnnnnnnnnnnnnnnnnnnnnnnnnnnnnnnnnnnnnnnnnnnnnnnnnnnnnnnnnnnnnnnnnnnnnnnnnnnnnnnnnnnnnnnnnnnnnnnnnnnnnnnnnnnnnnnnnnnnnnnnnnnnnnnnnnnnnnnnnnnnnnnnnnnnnnnnnnnnnnnnnnnnnnnnnnnnnnnnnnnnnnnnnnnnnnnnnnnnnnnnnnnnnnnnnnnnnnnnnnnnnnnnnnnnnnnnnnnnnnnnnnnnnnnnnnnnnnnnnnnnnnnnnnnnnnnnnnnnnnnnnnnnnnnnnnnnnnnnnnnnnnnnnnnnnnnnnnnnnnnnnnnnnnnnnnnnnnnnnnnnnnnnnnnnnnnnnnnnnnnnnnnnnnnnnnnnnnnnnnnnnnnnnnnnnnnnnnnnnnnnnnnnnnnnnnnnnnnnnnnnnnnnnnnnnnnnnnnnnnnnnnnnnnnnnnnnnnnnnnnnnnnnnnnnnnnnnnnnnnnnnnnnnnnnnnnnnnnnnnnnnnnnnnnnnnnnnnnnnnnnnnnnnnnnnnnnnnnnnnnnnnnnnnnnnnnnnnnnnnnnnnnnnnnnnnnnnnnnnnnnnnnnnnnnnnnnnnnnnnnnnnnnnnnnnnnnnnnnnnnnnnnnnnnnnnnnnnnnnnnnnnnnnnnnnnnnnnnnnnnnnnnnnnnnnnnnnnnnnnnnnnnnnnnnnnnnnnnnnnnnnnnnnnnnnnnnnnnnnnnnnnnnnnnnnnnnnnnnnnnnnnnnnnnnnnnnnnnnnnnnnnnnnnnnnnnnnnnnnnnnnnnnnnnnnnnnnnnnnnnnnnnnnnnnnnnnnnnnnnnnnnnnnnnnnnnnnnnnnnnnnnnnnnnnnnnnnnnnnnnnnnnnnnnnnnnnnnnnnnnnnnnnnnnnnnnnnnnnnnnnnnnnnnnnnnnnnnnnnnnnnnnnnnnnnnnnnnnnnnnnnnnnnnnnnnnnnnnnnnnnnnnnnnnnnnnnnnnnnnnnnnnnnnnnnnnnnnnnnnnnnnnnnnnnnnnnnnnnnnnnnnnnnnnnnnnnnnnnnnnnnnnnnnnnnnnnnnnnnnnnnnnnnnnnnnnnnnnnnnnnnnnnnnnnnnnnnnnnnnnnnnnnnnnnnnnnnnnnnnnnnnnnnnnnnnnnnnnnnnnnnnnnnnnnnnnnnnnnnnnnnnnnnnnnnnnnnnnnnnnnnnnnnnnnnnnnnnnnnnnnnnnnnnnnnnnnnnnnnnnnnnnnnnnnnnnnnnnnnnnnnnnnnnnnnnnnnnnnnnnnnnnnnnnnnnnnnnnnnnnnnnnnnnnnnnnnnnnnnnnnnnnnnnnnnnnnnnnnnnnnnnnnnnnnnnnnnnnnnnnnnnnnnnnnnnnnnnnnnnnnnnnnnnnnnnnnnnnnnnnnnnnnnnnnnnnnnnnnnnnnnnnnnnnnnnnnnnnnnnnnnnnnnnnnnnnnnnnnnnnnnnnnnnnnnnnnnnnnnnnnnnnnnnnnnnnnnnnnnnnnnnnnnnnnnnnnnnnnnnnnnnnnnnnnnnnnnnnnnnnnnnnnnnnnnnnnnnnnnnnnnnnnnnnnnnnnnnnnnnnnnnnnnnnnnnnnnnnnnnnnnnnnnnnnnnnnnnnnnnnnnnnnnnnnnnnnnnnnnnnnnnnnnnnnnnnnnnnnnnnnnnnnnnnnnnnnnnnnnnnnnnnnnnnnnnnnnnnnnnnnnnnnnnnnnnnnnnnnnnnnnnnnnnnnnnnnnnnnnnnnnnnnnnnnnnnnnnnnnnnnnnnnnnnnnnnnnnnnnnnnnnnnnnnnnnnnnnnnnnnnnnnnnnnnnnnnnnnnnnnnnnnnnnnnnnnnnnnnnnnnnnnnnnnnnnnnnnnnnnnnnnnnnnnnnnnnnnnnnnnnnnnnnnnnnnnnnnnnnnnnnnnnnnnnnnnnnnnnnnnnnnnnnnnnnnnnnnnnnnnnnnnnnnnnnnnnnnnnnnnnnnnnnnnnnnnnnnnnnnnnnnnnnnnnnnnnnnnnnnnnnnnnnnnnnnnnnnnnnnnnnnnnnnnnnnnnnnnnnnnnnnnnnnnnnnnnnnnnnnnnnnnnnnnnnnnnnnnnnnnnnnnnnnnnnnnnnnnnnnnnnnnnnnnnnnnnnnnnnnnnnnnnnnnnnnnnnnnnnnnnnnnnnnnnnnnnnnnnnnnnnnnnnnnnnnnnnnnnnnnnnnnnnnnnnnnnnnnnnnnnnnnnnnnnnnnnnnnnnnnnnnnnnnnnnnnnnnnnnnnnnnnnnnnnnnnnnnnnnnnnnnnnnnnnnnnnnnnnnnnnnnnnnnnnnnnnnnnnnnnnnnnnnnnnnnnnnnnnnnnnnnnnnnnnnnnnnnnnnnnnnnnnnnnnnnnnnnnnnnnnnnnnnnnnnnnnnnnnnnnnnnnnnnnnnnnnnnnnnnnnnnnnnnnnnnnnnnnnnnnnnnnnnnnnnnnnnnnnnnnnnnnnnnnnnnnnnnnnnnnnnnnnnnnnnnnnnnnnnnnnnnnnnnnnnnnnnnnnnnnnnnnnnnnnnnnnnnnnnnnnnnnnnnnnnnnnnnnnnnnnnnnnnnnnnnnnnnnnnnnnnnnnnnnnnnnnnnnnnnnnnnnnnnnnnnnnnnnnnnnnnnnnnnnnnnnnnnnnnnnnnnnnnnnnnnnnnnnnnnnnnnnnnnnnnnnnnnnnnnnnnnnnnnnnnnnnnnnnnnnnnnnnnnnnnnnnnnnnnnnnnnnnnnnnnnnnnnnnnnnnnnnnnnnnnnnnnnnnnnnnnnnnnnnnnnnnnnnnnnnnnnnnnnnnnnnnnnnnnnnnnnnnnnnnnnnnnnnnnnnnnnnnnnnnnnnnnnnnnnnnnnnnnnnnnnnnnnnnnnnnnnnnnnnnnnnnnnnnnnnnnnnnnnnnnnnnnnnnnnnnnnnnnnnnnnnnnnnnnnnnnnnnnnnnnnnnnnnnnnnnnnnnnnnnnnnnnnnnnnnnnnnnnnnnnnnnnnnnnnnnnnnnnnnnnnnnnnnnnnnnnnnnnnnnnnnnnnnnnnnnnnnnnnnnnnnnnnnnnnnnnnnnnnnnnnnnnnnnnnnnnnnnnnnnnnnnnnnnnnnnnnnnnnnnnnnnnnnnnnnnnnnnnnnnnnnnnnnnnnnnnnnnnnnnnnnnnnnnnnnnnnnnnnnnnnnnnnnnnnnnnnnnnnnnnnnnnnnnnnnnnnnnnnnnnnnnnnnnnnnnnnnnnnnnnnnnnnnnnnnnnnnnnnnnnnnnnnnnnnnnnnnnnnnnnnnnnnnnnnnnnnnnnnnnnnnnnnnnnnnnnnnnnnnnnnnnnnnnnnnnnnnnnnnnnnnnnnnnnnnnnnnnnnnnnnnnnnnnnnnnnnnnnnnnnnnnnnnnnnnnnnnnnnnnnnnnnnnnnnnnnnnnnnnnnnnnnnnnnnnnnnnnnnnnnnnnnnnnnnnnnnnnnnnnnnnnnnnnnnnnnnnnnnnnnnnnnnnnnnnnnnnnnnnnnnnnnnnnnnnnnnnnnnnnnnnnnnnnnnnnnnnnnnnnnnnnnnnnnnnnnnnnnnnnnnnnnnnnnnnnnnnnnnnnnnnnnnnnnnnnnnnnnnnnnnnnnnnnnnnnnnnnnnnnnnnnnnnnnnnnnnnnnnnnnnnnnnnnnnnnnnnnnnnnnnnnnnnnnnnnnnnnnnnnnnnnnnnnnnnnnnnnnnnnnnnnnnnnnnnnnnnnnnnnnnnnnnnnnnnnnnnnnnnnnnnnnnnnnnnnnnnnnnnnnnnnnnnnnnnnnnnnnnnnnnnnnnnnnnnnnnnnnnnnnnnnnnnnnnnnnnnnnnnnnnnnnnnnnnnnnnnnnnnnnnnnnnnnnnnnnnnnnnnnnnnnnnnnnnnnnnnnnnnnnnnnnnnnnnnnnnnnnnnnnnnnnnnnnnnnnnnnnnnnnnnnnnnnnnnnnnnnnnnnnnnnnnnnnnnnnnnnnnnnnnnnnnnnnnnnnnnnnnnnnnnnnnnnnnnnnnnnnnnnnnnnnnnnnnnnnnnnnnnnnnnnnnnnnnnnnnnnnnnnnnnnnnnnnnnnnnnnnnnnnnnnnnnnnnnnnnnnnnnnnnnnnnnnnnnnnnnnnnnnnnnnnnnnnnnnnnnnnnnnnnnnnnnnnnnnnnnnnnnnnnnnnnnnnnnnnnnnnnnnnnnnnnnnnnnnnnnnnnnnnnnnnnnnnnnnnnnnnnnnnnnnnnnnnnnnnnnnnnnnnnnnnnnnnnnnnnnnnnnnnnnnnnnnnnnnnnnnnnnnnnnnnnnnnnnnnnnnnnnnnnnnnnnnnnnnnnnnnnnnnnnnnnnnnnnnnnnnnnnnnnnnnnnnnnnnnnnnnnnnnnnnnnnnnnnnnnnnnnnnnnnnnnnnnnnnnnnnnnnnnnnnnnnnnnnnnnnnnnnnnnnnnnnnnnnnnnnnnnnnnnnnnnnnnnnnnnnnnnnnnnnnnnnnnnnnnnnnnnnnnnnnnnnnnnnnnnnnnnnnnnnnnnnnnnnnnnnnnnnnnnnnnnnnnnnnnnnnnnnnnnnnnnnnnnnnnnnnnnnnnnnnnnnnnnnnnnnnnnnnnnnnnnnnnnnnnnnnnnnnnnnnnnnnnnnnnnnnnnnnnnnnnnnnnnnnnnnnnnnnnnnnnnnnnnnnnnnnnnnnnnnnnnnnnnnnnnnnnnnnnnnnnnnnnnnnnnnnnnnnnnnnnnnnnnnnnnnnnnnnnnnnnnnnnnnnnnnnnnnnnnnnnnnnnnnnnnnnnnnnnnnnnnnnnnnnnnnnnnnnnnnnnnnnnnnnnnnnnnnnnnnnnnnnnnnnnnnnnnnnnnnnnnnnnnnnnnnnnnnnnnnnnnnnnnnnnnnnnnnnnnnnnnnnnnnnnnnnnnnnnnnnnnnnnnnnnnnnnnnnnnnnnnnnnnnnnnnnnnnnnnnnnnnnnnnnnnnnnnnnnnnnnnnnnnnnnnnnnnnnnnnnnnnnnnnnnnnnnnnnnnnnnnnnnnnnnnnnnnnnnnnnnnnnnnnnnnnnnnnnnnnnnnnnnnnnnnnnnnnnnnnnnnnnnnnnnnnnnnnnnnnnnnnnnnnnnnnnnnnnnnnnnnnnnnnnnnnnnnnnnnnnnnnnnnnnnnnnnnnnnnnnnnnnnnnnnnnnnnnnnnnnnnnnnnnnnnnnnnnnnnnnnnnnnnnnnnnnnnnnnnnnnnnnnnnnnnnnnnnnnnnnnnnnnnnnnnnnnnnnnnnnnnnnnnnnnnnnnnnnnnnnnnnnnnnnnnnnnnnnnnnnnnnnnnnnnnnnnnnnnnnnnnnnnnnnnnnnnnnnnnnnnnnnnnnnnnnnnnnnnnnnnnnnnnnnnnnnnnnnnnnnnnnnnnnnnnnnnnnnnnnnnnnnnnnnnnnnnnnnnnnnnnnnnnnnnnnnnnnnnnnnnnnnnnnnnnnnnnnnnnnnnnnnnnnnnnnnnnnnnnnnnnnnnnnnnnnnnnnnnnnnnnnnnnnnnnnnnnnnnnnnnnnnnnnnnnnnnnnnnnnnnnnnnnnnnnnnnnnnnnnnnnnnnnnnnnnnnnnnnnnnnnnnnnnnnnnnnnnnnnnnnnnnnnnnnnnnnnnnnnnnnnnnnnnnnnnnnnnnnnnnnnnnnnnnnnnnnnnnnnnnnnnnnnnnnnnnnnnnnnnnnnnnnnnnnnnnnnnnnnnnnnnnnnnnnnnnnnnnnnnnnnnnnnnnnnnnnnnnnnnnnnnnnnnnnnnnnnnnnnnnnnnnnnnnnnnnnnnnnnnnnnnnnnnnnnnnnnnnnnnnnnnnnnnnnnnnnnnnnnnnnnnnnnnnnnnnnnnnnnnnnnnnnnnnnnnnnnnnnnnnnnnnnnnnnnnnnnnnnnnnnnnnnnnnnnnnnnnnnnnnnnnnnnnnnnnnnnnnnnnnnnnnnnnnnnnnnnnnnnnnnnnnnnnnnnnnnnnnnnnnnnnnnnnnnnnnnnnnnnnnnnnnnnnnnnnnnnnnnnnnnnnnnnnnnnnnnnnnnnnnnnnnnnnnnnnnnnnnnnnnnnnnnnnnnnnnnnnnnnnnnnnnnnnnnnnnnnnnnnnnnnnnnnnnnnnnnnnnnnnnnnnnnnnnnnnnnnnnnnnnnnnnnnnnnnnnnnnnnnnnnnnnnnnnnnnnnnnnnnnnnnnnnnnnnnnnnnnnnnnnnnnnnnnnnnnnnnnnnnnnnnnnnnnnnnnnnnnnnnnnnnnnnnnnnnnnnnnnnnnnnnnnnnnnnnnnnnnnnnnnnnnnnnnnnnnnnnnnnnnnnnnnnnnnnnnnnnnnnnnnnnnnnnnnnnnnnnnnnnnnnnnnnnnnnnnnnnnnnnnnnnnnnnnnnnnnnnnnnnnnnnnnnnnnnnnnnnnnnnnnnnnnnnnnnnnnnnnnnnnnnnnnnnnnnnnnnnnnnnnnnnnnnnnnnnnnnnnnnnnnnnnnnnnnnnnnnnnnnnnnnnnnnnnnnnnnnnnnnnnnnnnnnnnnnnnnnnnnnnnnnnnnnnnnnnnnnnnnnnnnnnnnnnnnnnnnnnnnnnnnnnnnnnnnnnnnnnnnnnnnnnnnnnnnnnnnnnnnnnnnnnnnnnnnnnnnnnnnnnnnnnnnnnnnnnnnnnnnnnnnnnnnnnnnnnnnnnnnnnnnnnnnnnnnnnnnnnnnnnnnnnnnnnnnnnnnnnnnnnnnnnnnnnnnnnnnnnnnnnnnnnnnnnnnnnnnnnnnnnnnnnnnnnnnnnnnnnnnnnnnnnnnnnnnnnnnnnnnnnnnnnnnnnnnnnnnnnnnnnnnnnnnnnnnnnnnnnnnnnnnnnnnnnnnnnnnnnnnnnnnnnnnnnnnnnnnnnnnnnnnnnnnnnnnnnnnnnnnnnnnnnnnnnnnnnnnnnnnnnnnnnnnnnnnnnnnnnnnnnnnnnnnnnnnnnnnnnnnnnnnnnnnnnnnnnnnnnnnnnnnnnnnnnnnnnnnnnnnnnnnnnnnnnnnnnnnnnnnnnnnnnnnnnnnnnnnnnnnnnnnnnnnnnnnnnnnnnnnnnnnnnnnnnnnnnnnnnnnnnnnnnnnnnnnnnnnnnnnnnnnnnnnnnnnnnnnnnnnnnnnnnnnnnnnnnnnnnnnnnnnnnnnnnnnnnnnnnnnnnnnnnnnnnnnnnnnnnnnnnnnnnnnnnnnnnnnnnnnnnnnnnnnnnnnnnnnnnnnnnnnnnnnnnnnnnnnnnnnnnnnnnnnnnnnnnnnnnnnnnnnnnnnnnnnnnnnnnnnnnnnnnnnnnnnnnnnnnnnnnnnnnnnnnnnnnnnnnnnnnnnnnnnnnnnnnnnnnnnnnnnnnnnnnnnnnnnnnnnnnnnnnnnnnnnnnnnnnnnnnnnnnnnnnnnnnnnnnnnnnnnnnnnnnnnnnnnnnnnnnnnnnnnnnnnnnnnnnnnnnnnnnnnnnnnnnnnnnnnnnnnnnnnnnnnnnnnnnnnnnnnnnnnnnnnnnnnnnnnnnnnnnnnnnnnnnnnnnnnnnnnnnnnnnnnnnnnnnnnnnnnnnnnnnnnnnnnnnnnnnnnnnnnnnnnnnnnnnnnnnnnnnnnnnnnnnnnnnnnnnnnnnnnnnnnnnnnnnnnnnnnnnnnnnnnnnnnnnnnnnnnnnnnnnnnnnnnnnnnnnnnnnnnnnnnnnnnnnnnnnnnnnnnnnnnnnnnnnnnnnnnnnnnnnnnnnnnnnnnnnnnnnnnnnnnnnnnnnnnnnnnnnnnnnnnnnnnnnnnnnnnnnnnnnnnnnnnnnnnnnnnnnnnnnnnnnnnnnnnnnnnnnnnnnnnnnnnnnnnnnnnnnnnnnnnnnnnnnnnnnnnnnnnnnnnnnnnnnnnnnnnnnnnnnnnnnnnnnnnnnnnnnnnnnnnnnnnnnnnnnnnnnnnnnnnnnnnnnnnnnnnnnnnnnnnnnnnnnnnnnnnnnnnnnnnnnnnnnnnnnnnnnnnnnnnnnnnnnnnnnnnnnnnnnnnnnnnnnnnnnnnnnnnnnnnnnnnnnnnnnnnnnnnnnnnnnnnnnnnnnnnnnnnnnnnnnnnnnnnnnnnnnnnnnnnnnnnnnnnnnnnnnnnnnnnnnnnnnnnnnnnnnnnnnnnnnnnnnnnnnnnnnnnnnnnnnnnnnnnnnnnnnnnnnnnnnnnnnnnnnnnnnnnnnnnnnnnnnnnnnnnnnnnnnnnnnnnnnnnnnnnnnnnnnnnnnnnnnnnnnnnnnnnnnnnnnnnnnnnnnnnnnnnnnnnnnnnnnnnnnnnnnnnnnnnnnnnnnnnnnnnnnnnnnnnnnnnnnnnnnnnnnnnnnnnnnnnnnnnnnnnnnnnnnnnnnnnnnnnnnnnnnnnnnnnnnnnnnnnnnnnnnnnnnnnnnnnnnnnnnnnnnnnnnnnnnnnnnnnnnnnnnnnnnnnnnnnnnnnnnnnnnnnnnnnnnnnnnnnnnnnnnnnnnnnnnnnnnnnnnnnnnnnnnnnnnnnnnnnnnnnnnnnnnnnnnnnnnnnnnnnnnnnnnnnnnnnnnnnnnnnnnnnnnnnnnnnnnnnnnnnnnnnnnnnnnnnnnnnnnnnnnnnnnnnnnnnnnnnnnnnnnnnnnnnnnnnnnnnnnnnnnnnnnnnnnnnnnnnnnnnnnnnnnnnnnnnnnnnnnnnnnnnnnnnnnnnnnnnnnnnnnnnnnnnnnnnnnnnnnnnnnnnnnnnnnnnnnnnnnnnnnnnnnnnnnnnnnnnnnnnnnnnnnnnnnnnnnnnnnnnnnnnnnnnnnnnnnnnnnnnnnnnnnnnnnnnnnnnnnnnnnnnnnnnnnnnnnnnnnnnnnnnnnnnnnnnnnnnnnnnnnnnnnnnnnnnnnnnnnnnnnnnnnnnnnnnnnnnnnnnnnnnnnnnnnnnnnnnnnnnnnnnnnnnnnnnnnnnnnnnnnnnnnnnnnnnnnnnnnnnnnnnnnnnnnnnnnnnnnnnnnnnnnnnnnnnnnnnnnnnnnnnnnnnnnnnnnnnnnnnnnnnnnnnnnnnnnnnnnnnnnnnnnnnnnnnnnnnnnnnnnnnnnnnnnnnnnnnnnnnnnnnnnnnnnnnnnnnnnnnnnnnnnnnnnnnnnnnnnnnnnnnnnnnnnnnnnnnnnnnnnnnnnnnnnnnnnnnnnnnnnnnnnnnnnnnnnnnnnnnnnnnnnnnnnnnnnnnnnnnnnnnnnnnnnnnnnnnnnnnnnnnnnnnnnnnnnnnnnnnnnnnnnnnnnnnnnnnnnnnnnnnnnnnnnnnnnnnnnnnnnnnnnnnnnnnnnnnnnnnnnnnnnnnnnnnnnnnnnnnnnnnnnnnnnnnnnnnnnnnnnnnnnnnnnnnnnnnnnnnnnnnnnnnnnnnnnnnnnnnnnnnnnnnnnnnnnnnnnnnnnnnnnnnnnnnnnnnnnnnnnnnnnnnnnnnnnnnnnnnnnnnnnnnnnnnnnnnnnnnnnnnnnnnnnnnnnnnnnnnnnnnnnnnnnnnnnnnnnnnnnnnnnnnnnnnnnnnnnnnnnnnnnnnnnnnnnnnnnnnnnnnnnnnnnnnnnnnnnnnnnnnnnnnnnnnnnnnnnnnnnnnnnnnnnnnnnnnnnnnnnnnnnnnnnnnnnnnnnnnnnnnnnnnnnnnnnnnnnnnnnnnnnnnnnnnnnnnnnnnnnnnnnnnnnnnnnnnnnnnnnnnnnnnnnnnnnnnnnnnnnnnnnnnnnnnnnnnnnnnnnnnnnnnnnnnnnnnnnnnnnnnnnnnnnnnnnnnnnnnnnnnnnnnnnnnnnnnnnnnnnnnnnnnnnnnnnnnnnnnnnnnnnnnnnnnnnnnnnnnnnnnnnnnnnnnnnnnnnnnnnnnnnnnnnnnnnnnnnnnnnnnnnnnnnnnnnnnnnnnnnnnnnnnnnnnnnnnnnnnnnnnnnnnnnnnnnnnnnnnnnnnnnnnnnnnnnnnnnnnnnnnnnnnnnnnnnnnnnnnnnnnnnnnnnnnnnnnnnnnnnnnnnnnnnnnnnnnnnnnnnnnnnnnnnnnnnnnnnnnnnnnnnnnnnnnnnnnnnnnnnnnnnnnnnnnnnnnnnnnnnnnnnnnnnnnnnnnnnnnnnnnnnnnnnnnnnnnnnnnnnnnnnnnnnnnnnnnnnnnnnnnnnnnnnnnnnnnnnnnnnnnnnnnnnnnnnnnnnnnnnnnnnnnnnnnnnnnnnnnnnnnnnnnnnnnnnnnnnnnnnnnnnnnnnnnnnnnnnnnnnnnnnnnnnnnnnnnnnnnnnnnnnnnnnnnnnnnnnnnnnnnnnnnnnnnnnnnnnnnnnnnnnnnnnnnnnnnnnnnnnnnnnnnnnnnnnnnnnnnnnnnnnnnnnnnnnnnnnnnnnnnnnnnnnnnnnnnnnnnnnnnnnnnnnnnnnnnnnnnnnnnnnnnnnnnnnnnnnnnnnnnnnnnnnnnnnnnnnnnnnnnnnnnnnnnnnnnnnnnnnnnnnnnnnnnnnnnnnnnnnnnnnnnnnnnnnnnnnnnnnnnnnnnnnnnnnnnnnnnnnnnnnnnnnnnnnnnnnnnnnnnnnnnnnnnnnnnnnnnnnnnnnnnnnnnnnnnnnnnnnnnnnnnnnnnnnnnnnnnnnnnnnnnnnnnnnnnnnnnnnnnnnnnnnnnnnnnnnnnnnnnnnnnnnnnnnnnnnnnnnnnnnnnnnnnnnnnnnnnnnnnnnnnnnnnnnnnnnnnnnnnnnnnnnnnnnnnnnnnnnnnnnnnnnnnnnnnnnnnnnnnnnnnnnnnnnnnnnnnnnnnnnnnnnnnnnnnnnnnnnnnnnnnnnnnnnnnnnnnnnnnnnnnnnnnnnnnnnnnnnnnnnnnnnnnnnnnnnnnnnnnnnnnnnnnnnnnnnnnnnnnnnnnnnnnnnnnnnnnnnnnnnnnnnnnnnnnnnnnnnnnnnnnnnnnnnnnnnnnnnnnnnnnnnnnnnnnnnnnnnnnnnnnnnnnnnnnnnnnnnnnnnnnnnnnnnnnnnnnnnnnnnnnnnnnnnnnnnnnnnnnnnnnnnnnnnnnnnnnnnnnnnnnnnnnnnnnnnnnnnnnnnnnnnnnnnnnnnnnnnnnnnnnnnnnnnnnnnnnnnnnnnnnnnnnnnnnnnnnnnnnnnnnnnnnnnnnnnnnnnnnnnnnnnnnnnnnnnnnnnnnnnnnnnnnnnnnnnnnnnnnnnnnnnnnnnnnnnnnnnnnnnnnnnnnnnnnnnnnnnnnnnnnnnnnnnnnnnnnnnnnnnnnnnnnnnnnnnnnnnnnnnnnnnnnnnnnnnnnnnnnnnnnnnnnnnnnnnnnnnnnnnnnnnnnnnnnnnnnnnnnnnnnnnnnnnnnnnnnnnnnnnnnnnnnnnnnnnnnnnnnnnnnnnnnnnnnnnnnnnnnnnnnnnnnnnnnnnnnnnnnnnnnnnnnnnnnnnnnnnnnnnnnnnnnnnnnnnnnnnnnnnnnnnnnnnnnnnnnnnnnnnnnnnnnnnnnnnnnnnnnnnnnnnnnnnnnnnnnnnnnnnnnnnnnnnnnnnnnnnnnnnnnnnnnnnnnnnnnnnnnnnnnnnnnnnnnnnnnnnnnnnnnnnnnnnnnnnnnnnnnnnnnnnnnnnnnnnnnnnnnnnnnnnnnnnnnnnnnnnnnnnnnnnnnnnnnnnnnnnnnnnnnnnnnnnnnnnnnnnnnnnnnnnnnnnnnnnnnnnnnnnnnnnnnnnnnnnnnnnnnnnnnnnnnnnnnnnnnnnnnnnnnnnnnnnnnnnnnnnnnnnnnnnnnnnnnnnnnnnnnnnnnnnnnnnnnnnnnnnnnnnnnnnnnnnnnnnnnnnnnnnnnnnnnnnnnnnnnnnnnnnnnnnnnnnnnnnnnnnnnnnnnnnnnnnnnnnnnnnnnnnnnnnnnnnnnnnnnnnnnnnnnnnnnnnnnnnnnnnnnnnnnnnnnnnnnnnnnnnnnnnnnnnnnnnnnnnnnnnnnnnnnnnnnnnnnnnnnnnnnnnnnnnnnnnnnnnnnnnnnnnnnnnnnnnnnnnnnnnnnnnnnnnnnnnnnnnnnnnnnnnnnnnnnnnnnnnnnnnnnnnnnnnnnnnnnnnnnnnnnnnnnnnnnnnnnnnnnnnnnnnnnnnnnnnnnnnnnnnnnnnnnnnnnnnnnnnnnnnnnnnnnnnnnnnnnnnnnnnnnnnnnnnnnnnnnnnnnnnnnnnnnnnnnnnnnnnnnnnnnnnnnnnnnnnnnnnnnnnnnnnnnnnnnnnnnnnnnnnnnnnnnnnnnnnnnnnnnnnnnnnnnnnnnnnnnnnnnnnnnnnnnnnnnnnnnnnnnnnnnnnnnnnnnnnnnnnnnnnnnnnnnnnnnnnnnnnnnnnnnnnnnnnnnnnnnnnnnnnnnnnnnnnnnnnnnnnnnnnnnnnnnnnnnnnnnnnnnnnnnnnnnnnnnnnnnnnnnnnnnnnnnnnnnnnnnnnnnnnnnnnnnnnnnnnnnnnnnnnnnnnnnnnnnnnnnnnnnnnnnnnnnnnnnnnnnnnnnnnnnnnnnnnnnnnnnnnnnnnnnnnnnnnnnnnnnnnnnnnnnnnnnnnnnnnnnnnnnnnnnnnnnnnnnnnnnnnnnnnnnnnnnnnnnnnnnnnnnnnnnnnnnnnnnnnnnnnnnnnnnnnnnnnnnnnnnnnnnnnnnnnnnnnnnnnnnnnnnnnnnnnnnnnnnnnnnnnnnnnnnnnnnnnnnnnnnnnnnnnnnnnnnnnnnnnnnnnnnnnnnnnnnnnnnnnnnnnnnnnnnnnnnnnnnnnnnnnnnnnnnnnnnnnnnnnnnnnnnnnnnnnnnnnnnnnnnnnnnnnnnnnnnnnnnnnnnnnnnnnnnnnnnnnnnnnnnnnnnnnnnnnnnnnnnnnnnnnnnnnnnnnnnnnnnnnnnnnnnnnnnnnnnnnnnnnnnnnnnnnnnnnnnnnnnnnnnnnnnnnnnnnnnnnnnnnnnnnnnnnnnnnnnnnnnnnnnnnnnnnnnnnnnnnnnnnnnnnnnnnnnnnnnnnnnnnnnnnnnnnnnnnnnnnnnnnnnnnnnnnnnnnnnnnnnnnnnnnnnnnnnnnnnnnnnnnnnnnnnnnnnnnnnnnnnnnnnnnnnnnnnnnnnnnnnnnnnnnnnnnnnnnnnnnnnnnnnnnnnnnnnnnnnnnnnnnnnnnnnnnnnnnnnnnnnnnnnnnnnnnnnnnnnnnnnnnnnnnnnnnnnnnnnnnnnnnnnnnnnnnnnnnnnnnnnnnnnnnnnnnnnnnnnnnnnnnnnnnnnnnnnnnnnnnnnnnnnnnnnnnnnnnnnnnnnnnnnnnnnnnnnnnnnnnnnnnnnnnnnnnnnnnnnnnnnnnnnnnnnnnnnnnnnnnnnnnnnnnnnnnnnnnnnnnnnnnnnnnnnnnnnnnnnnnnnnnnnnnnnnnnnnnnnnnnnnnnnnnnnnnnnnnnnnnnnnnnnnnnnnnnnnnnnnnnnnnnnnnnnnnnnnnnnnnnnnnnnnnnnnnnnnnnnnnnnnnnnnnnnnnnnnnnnnnnnnnnnnnnnnnnnnnnnnnnnnnnnnnnnnnnnnnnnnnnnnnnnnnnnnnnnnnnnnnnnnnnnnnnnnnnnnnnnnnnnnnnnnnnnnnnnnnnnnnnnnnnnnnnnnnnnnnnnnnnnnnnnnnnnnnnnnnnnnnnnnnnnnnnnnnnnnnnnnnnnnnnnnnnnnnnnnnnnnnnnnnnnnnnnnnnnnnnnnnnnnnnnnnnnnnnnnnnnnnnnnnnnnnnnnnnnnnnnnnnnnnnnnnnnnnnnnnnnnnnnnnnnnnnnnnnnnnnnnnnnnnnnnnnnnnnnnnnnnnnnnnnnnnnnnnnnnnnnnnnnnnnnnnnnnnnnnnnnnnnnnnnnnnnnnnnnnnnnnnnnnnnnnnnnnnnnnnnnnnnnnnnnnnnnnnnnnnnnnnnnnnnnnnnnnnnnnnnnnnnnnnnnnnnnnnnnnnnnnnnnnnnnnnnnnnnnnnnnnnnnnnnnnnnnnnnnnnnnnnnnnnnnnnnnnnnnnnnnnnnnnnnnnnnnnnnnnnnnnnnnnnnnnnnnnnnnnnnnnnnnnnnnnnnnnnnnnnnnnnnnnnnnnnnnnnnnnnnnnnnnnnnnnnnnnnnnnnnnnnnnnnnnnnnnnnnnnnnnnnnnnnnnnnnnnnnnnnnnnnnnnnnnnnnnnnnnnnnnnnnnnnnnnnnnnnnnnnnnnnnnnnnnnnnnnnnnnnnnnnnnnnnnnnnnnnnnnnnnnnnnnnnnnnnnnnnnnnnnnnnnnnnnnnnnnnnnnnnnnnnnnnnnnnnnnnnnnnnnnnnnnnnnnnnnnnnnnnnnnnnnnnnnnnnnnnnnnnnnnnnnnnnnnnnnnnnnnnnnnnnnnnnnnnnnnnnnnnnnnnnnnnnnnnnnnnnnnnnnnnnnnnnnnnnnnnnnnnnnnnnnnnnnnnnnnnnnnnnnnnnnnnnnnnnnnnnnnnnnnnnnnnnnnnnnnnnnnnnnnnnnnnnnnnnnnnnnnnnnnnnnnnnnnnnnnnnnnnnnnnnnnnnnnnnnnnnnnnnnnnnnnnnnnnnnnnnnnnnnnnnnnnnnnnnnnnnnnnnnnnnnnnnnnnnnnnnnnnnnnnnnnnnnnnnnnnnnnnnnnnnnnnnnnnnnnnnnnnnnnnnnnnnnnnnnnnnnnnnnnnnnnnnnnnnnnnnnnnnnnnnnnnnnnnnnnnnnnnnnnnnnnnnnnnnnnnnnnnnnnnnnnnnnnnnnnnnnnnnnnnnnnnnnnnnnnnnnnnnnnnnnnnnnnnnnnnnnnnnnnnnnnnnnnnnnnnnnnnnnnnnnnnnnnnnnnnnnnnnnnnnnnnnnnnnnnnnnnnnnnnnnnnnnnnnnnnnnnnnnnnnnnnnnnnnnnnnnnnnnnnnnnnnnnnnnnnnnnnnnnnnnnnnnnnnnnnnnnnnnnnnnnnnnnnnnnnnnnnnnnnnnnnnnnnnnnnnnnnnnnnnnnnnnnnnnnnnnnnnnnnnnnnnnnnnnnnnnnnnnnnnnnnnnnnnnnnnnnnnnnnnnnnnnnnnnnnnnnnnnnnnnnnnnnnnnnnnnnnnnnnnnnnnnnnnnnnnnnnnnnnnnnnnnnnnnnnnnnnnnnnnnnnnnnnnnnnnnnnnnnnnnnnnnnnnnnnnnnnnnnnnnnnnnnnnnnnnnnnnnnnnnnnnnnnnnnnnnnnnnnnnnnnnnnnnnnnnnnnnnnnnnnnnnnnnnnnnnnnnnnnnnnnnnnnnnnnnnnnnnnnnnnnnnnnnnnnnnnnnnnnnnnnnnnnnnnnnnnnnnnnnnnnnnnnnnnnnnnnnnnnnnnnnnnnnnnnnnnnnnnnnnnnnnnnnnnnnnnnnnnnnnnnnnnnnnnnnnnnnnnnnnnnnnnnnnnnnnnnnnnnnnnnnnnnnnnnnnnnnnnnnnnnnnnnnnnnnnnnnnnnnnnnnnnnnnnnnnnnnnnnnnnnnnnnnnnnnnnnnnnnnnnnnnnnnnnnnnnnnnnnnnnnnnnnnnnnnnnnnnnnnnnnnnnnnnnnnnnnnnnnnnnnnnnnnnnnnnnnnnnnnnnnnnnnnnnnnnnnnnnnnnnnnnnnnnnnnnnnnnnnnnnnnnnnnnnnnnnnnnnnnnnnnnnnnnnnnnnnnnnnnnnnnnnnnnnnnnnnnnnnnnnnnnnnnnnnnnnnnnnnnnnnnnnnnnnnnnnnnnnnnnnnnnnnnnnnnnnnnnnnnnnnnnnnnnnnnnnnnnnnnnnnnnnnnnnnnnnnnnnnnnnnnnnnnnnnnnnnnnnnnnnnnnnnnnnnnnnnnnnnnnnnnnnnnnnnnnnnnnnnnnnnnnnnnnnnnnnnnnnnnnnnnnnnnnnnnnnnnnnnnnnnnnnnnnnnnnnnnnnnnnnnnnnnnnnnnnnnnnnnnnnnnnnnnnnnnnnnnnnnnnnnnnnnnnnnnnnnnnnnnnnnnnnnnnnnnnnnnnnnnnnnnnnnnnnnnnnnnnnnnnnnnnnnnnnnnnnnnnnnnnnnnnnnnnnnnnnnnnnnnnnnnnnnnnnnnnnnnnnnnnnnnnnnnnnnnnnnnnnnnnnnnnnnnnnnnnnnnnnnnnnnnnnnnnnnnnnnnnnnnnnnnnnnnnnnnnnnnnnnnnnnnnnnnnnnnnnnnnnnnnnnnnnnnnnnnnnnnnnnnnnnnnnnnnnnnnnnnnnnnnnnnnnnnnnnnnnnnnnnnnnnnnnnnnnnnnnnnnnnnnnnnnnnnnnnnnnnnnnnnnnnnnnnnnnnnnnnnnnnnnnnnnnnnnnnnnnnnnnnnnnnnnnnnnnnnnnnnnnnnnnnnnnnnnnnnnnnnnnnnnnnnnnnnnnnnnnnnnnnnnnnnnnnnnnnnnnnnnnnnnnnnnnnnnnnnnnnnnnnnnnnnnnnnnnnnnnnnnnnnnnnnnnnnnnnnnnnnnnnnnnnnnnnnnnnnnnnnnnnnnnnnnnnnnnnnnnnnnnnnnnnnnnnnnnnnnnnnnnnnnnnnnnnnnnnnnnnnnnnnnnnnnnnnnnnnnnnnnnnnnnnnnnnnnnnnnnnnnnnnnnnnnnnnnnnnnnnnnnnnnnnnnnnnnnnnnnnnnnnnnnnnnnnnnnnnnnnnnnnnnnnnnnnnnnnnnnnnnnnnnnnnnnnnnnnnnnnnnnnnnnnnnnnnnnnnnnnnnnnnnnnnnnnnnnnnnnnnnnnnnnnnnnnnnnnnnnnnnnnnnnnnnnnnnnnnnnnnnnnnnnnnnnnnnnnnnnnnnnnnnnnnnnnnnnnnnnnnnnnnnnnnnnnnnnnnnnnnnnnnnnnnnnnnnnnnnnnnnnnnnnnnnnnnnnnnnnnnnnnnnnnnnnnnnnnnnnnnnnnnnnnnnnnnnnnnnnnnnnnnnnnnnnnnnnnnnnnnnnnnnnnnnnnnnnnnnnnnnnnnnnnnnnnnnnnnnnnnnnnnnnnnnnnnnnnnnnnnnnnnnnnnnnnnnnnnnnnnnnnnnnnnnnnnnnnnnnnnnnnnnnnnnnnnnnnnnnnnnnnnnnnnnnnnnnnnnnnnnnnnnnnnnnnnnnnnnnnnnnnnnnnnnnnnnnnnnnnnnnnnnnnnnnnnnnnnnnnnnnnnnnnnnnnnnnnnnnnnnnnnnnnnnnnnnnnnnnnnnnnnnnnnnnnnnnnnnnnnnnnnnnnnnnnnnnnnnnnnnnnnnnnnnnnnnnnnnnnnnnnnnnnnnnnnnnnnnnnnnnnnnnnnnnnnnnnnnnnnnnnnnnnnnnnnnnnnnnnnnnnnnnnnnnnnnnnnnnnnnnnnnnnnnnnnnnnnnnnnnnnnnnnnnnnnnnnnnnnnnnnnnnnnnnnnnnnnnnnnnnnnnnnnnnnnnnnnnnnnnnnnnnnnnnnnnnnnnnnnnnnnnnnnnnnnnnnnnnnnnnnnnnnnnnnnnnnnnnnnnnnnnnnnnnnnnnnnnnnnnnnnnnnnnnnnnnnnnnnnnnnnnnnnnnnnnnnnnnnnnnnnnnnnnnnnnnnnnnnnnnnnnnnnnnnnnnnnnnnnnnnnnnnnnnnnnnnnnnnnnnnnnnnnnnnnnnnnnnnnnnnnnnnnnnnnnnnnnnnnnnnnnnnnnnnnnnnnnnnnnnnnnnnnnnnnnnnnnnnnnnnnnnnnnnnnnnnnnnnnnnnnnnnnnnnnnnnnnnnnnnnnnnnnnnnnnnnnnnnnnnnnnnnnnnnnnnnnnnnnnnnnnnnnnnnnnnnnnnnnnnnnnnnnnnnnnnnnnnnnnnnnnnnnnnnnnnnnnnnnnnnnnnnnnnnnnnnnnnnnnnnnnnnnnnnnnnnnnnnnnnnnnnnnnnnnnnnnnnnnnnnnnnnnnnnnnnnnnnnnnnnnnnnnnnnnnnnnnnnnnnnnnnnnnnnnnnnnnnnnnnnnnnnnnnnnnnnnnnnnnnnnnnnnnnnnnnnnnnnnnnnnnnnnnnnnnnnnnnnnnnnnnnnnnnnnnnnnnnnnnnnnnnnnnnnnnnnnnnnnnnnnnnnnnnnnnnnnnnnnnnnnnnnnnnnnnnnnnnnnnnnnnnnnnnnnnnnnnnnnnnnnnnnnnnnnnnnnnnnnnnnnnnnnnnnnnnnnnnnnnnnnnnnnnnnnnnnnnnnnnnnnnnnnnnnnnnnnnnnnnnnnnnnnnnnnnnnnnnnnnnnnnnnnnnnnnnnnnnnnnnnnnnnnnnnnnnnnnnnnnnnnnnnnnnnnnnnnnnnnnnnnnnnnnnnnnnnnnnnnnnnnnnnnnnnnnnnnnnnnnnnnnnnnnnnnnnnnnnnnnnnnnnnnnnnnnnnnnnnnnnnnnnnnnnnnnnnnnnnnnnnnnnnnnnnnnnnnnnnnnnnnnnnnnnnnnnnnnnnnnnnnnnnnnnnnnnnnnnnnnnnnnnnnnnnnnnnnnnnnnnnnnnnnnnnnnnnnnnnnnnnnnnnnnnnnnnnnnnnnnnnnnnnnnnnnnnnnnnnnnnnnnnnnnnnnnnnnnnnnnnnnnnnnnnnnnnnnnnnnnnnnnnnnnnnnnnnnnnnnnnnnnnnnnnnnnnnnnnnnnnnnnnnnnnnnnnnnnnnnnnnnnnnnnnnnnnnnnnnnnnnnnnnnnnnnnnnnnnnnnnnnnnnnnnnnnnnnnnnnnnnnnnnnnnnnnnnnnnnnnnnnnnnnnnnnnnnnnnnnnnnnnnnnnnnnnnnnnnnnnnnnnnnnnnnnnnnnnnnnnnnnnnnnnnnnnnnnnnnnnnnnnnnnnnnnnnnnnnnnnnnnnnnnnnnnnnnnnnnnnnnnnnnnnnnnnnnnnnnnnnnnnnnnnnnnnnnnnnnnnnnnnnnnnnnnnnnnnnnnnnnnnnnnnnnnnnnnnnnnnnnnnnnnnnnnnnnnnnnnnnnnnnnnnnnnnnnnnnnnnnnnnnnnnnnnnnnnnnnnnnnnnnnnnnnnnnnnnnnnnnnnnnnnnnnnnnnnnnnnnnnnnnnnnnnnnnnnnnnnnnnnnnnnnnnnnnnnnnnnnnnnnnnnnnnnnnnnnnnnnnnnnnnnnnnnnnnnnnnnnnnnnnnnnnnnnnnnnnnnnnnnnnnnnnnnnnnnnnnnnnnnnnnnnnnnnnnnnnnnnnnnnnnnnnnnnnnnnnnnnnnnnnnnnnnnnnnnnnnnnnnnnnnnnnnnnnnnnnnnnnnnnnnnnnnnnnnnnnnnnnnnnnnnnnnnnnnnnnnnnnnnnnnnnnnnnnnnnnnnnnnnnnnnnnnnnnnnnnnnnnnnnnnnnnnnnnnnnnnnnnnnnnnnnnnnnnnnnnnnnnnnnnnnnnnnnnnnnnnnnnnnnnnnnnnnnnnnnnnnnnnnnnnnnnnnnnnnnnnnnnnnnnnnnnnnnnnnnnnnnnnnnnnnnnnnnnnnnnnnnnnnnnnnnnnnnnnnnnnnnnnnnnnnnnnnnnnnnnnnnnnnnnnnnnnnnnnnnnnnnnnnnnnnnnnnnnnnnnnnnnnnnnnnnnnnnnnnnnnnnnnnnnnnnnnnnnnnnnnnnnnnnnnnnnnnnnnnnnnnnnnnnnnnnnnnnnnnnnnnnnnnnnnnnnnnnnnnnnnnnnnnnnnnnnnnnnnnnnnnnnnnnnnnnnnnnnnnnnnnnnnnnnnnnnnnnnnnnnnnnnnnnnnnnnnnnnnnnnnnnnnnnnnnnnnnnnnnnnnnnnnnnnnnnnnnnnnnnnnnnnnnnnnnnnnnnnnnnnnnnnnnnnnnnnnnnnnnnnnnnnnnnnnnnnnnnnnnnnnnnnnnnnnnnnnnnnnnnnnnnnnnnnnnnnnnnnnnnnnnnnnnnnnnnnnnnnnnnnnnnnnnnnnnnnnnnnnnnnnnnnnnnnnnnnnnnnnnnnnnnnnnnnnnnnnnnnnnnnnnnnnnnnnnnnnnnnnnnnnnnnnnnnnnnnnnnnnnnnnnnnnnnnnnnnnnnnnnnnnnnnnnnnnnnnnnnnnnnnnnnnnnnnnnnnnnnnnnnnnnnnnnnnnnnnnnnnnnnnnnnnnnnnnnnnnnnnnnnnnnnnnnnnnnnnnnnnnnnnnnnnnnnnnnnnnnnnnnnnnnnnnnnnnnnnnnnnnnnnnnnnnnnnnnnnnnnnnnnnnnnnnnnnnnnnnnnnnnnnnnnnnnnnnnnnnnnnnnnnnnnnnnnnnnnnnnnnnnnnnnnnnnnnnnnnnnnnnnnnnnnnnnnnnnnnnnnnnnnnnnnnnnnnnnnnnnnnnnnnnnnnnnnnnnnnnnnnnnnnnnnnnnnnnnnnnnnnnnnnnnnnnnnnnnnnnnnnnnnnnnnnnnnnnnnnnnnnnnnnnnnnnnnnnnnnnnnnnnnnnnnnnnnnnnnnnnnnnnnnnnnnnnnnnnnnnnnnnnnnnnnnnnnnnnnnnnnnnnnnnnnnnnnnnnnnnnnnnnnnnnnnnnnnnnnnnnnnnnnnnnnnnnnnnnnnnnnnnnnnnnnnnnnnnnnnnnnnnnnnnnnnnnnnnnnnnnnnnnnnnnnnnnnnnnnnnnnnnnnnnnnnnnnnnnnnnnnnnnnnnnnnnnnnnnnnnnnnnnnnnnnnnnnnnnnnnnnnnnnnnnnnnnnnnnnnnnnnnnnnnnnnnnnnnnnnnnnnnnnnnnnnnnnnnnnnnnnnnnnnnnnnnnnnnnnnnnnnnnnnnnnnnnnnnnnnnnnnnnnnnnnnnnnnnnnnnnnnnnnnnnnnnnnnnnnnnnnnnnnnnnnnnnnnnnnnnnnnnnnnnnnnnnnnnnnnnnnnnnnnnnnnnnnnnnnnnnnnnnnnnnnnnnnnnnnnnnnnnnnnnnnnnnnnnnnnnnnnnnnnnnnnnnnnnnnnnnnnnnnnnnnnnnnnnnnnnnnnnnnnnnnnnnnnnnnnnnnnnnnnnnnnnnnnnnnnnnnnnnnnnnnnnnnnnnnnnnnnnnnnnnnnnnnnnnnnnnnnnnnnnnnnnnnnnnnnnnnnnnnnnnnnnnnnnnnnnnnnnnnnnnnnnnnnnnnnnnnnnnnnnnnnnnnnnnnnnnnnnnnnnnnnnnnnnnnnnnnnnnnnnnnnnnnnnnnnnnnnnnnnnnnnnnnnnnnnnnnnnnnnnnnnnnnnnnnnnnnnnnnnnnnnnnnnnnnnnnnnnnnnnnnnnnnnnnnnnnnnnnnnnnnnnnnnnnnnnnnnnnnnnnnnnnnnnnnnnnnnnnnnnnnnnnnnnnnnnnnnnnnnnnnnnnnnnnnnnnnnnnnnnnnnnnnnnnnnnnnnnnnnnnnnnnnnnnnnnnnnnnnnnnnnnnnnnnnnnnnnnnnnnnnnnnnnnnnnnnnnnnnnnnnnnnnnnnnnnnnnnnnnnnnnnnnnnnnnnnnnnnnnnnnnnnnnnnnnnnnnnnnnnnnnnnnnnnnnnnnnnnnnnnnnnnnnnnnnnnnnnnnnnnnnnnnnnnnnnnnnnnnnnnnnnnnnnnnnnnnnnnnnnnnnnnnnnnnnnnnnnnnnnnnnnnnnnnnnnnnnnnnnnnnnnnnnnnnnnnnnnnnnnnnnnnnnnnnnnnnnnnnnnnnnnnnnnnnnnnnnnnnnnnnnnnnnnnnnnnnnnnnnnnnnnnnnnnnnnnnnnnnnnnnnnnnnnnnnnnnnnnnnnnnnnnnnnnnnnnnnnnnnnnnnnnnnnnnnnnnnnnnnnnnnnnnnnnnnnnnnnnnnnnnnnnnnnnnnnnnnnnnnnnnnnnnnnnnnnnnnnnnnnnnnnnnnnnnnnnnnnnnnnnnnnnnnnnnnnnnnnnnnnnnnnnnnnnnnnnnnnnnnnnnnnnnnnnnnnnnnnnnnnnnnnnnnnnnnnnnnnnnnnnnnnnnnnnnnnnnnnnnnnnnnnnnnnnnnnnnnnnnnnnnnnnnnnnnnnnnnnnnnnnnnnnnnnnnnnnnnnnnnnnnnnnnnnnnnnnnnnnnnnnnnnnnnnnnnnnnnnnnnnnnnnnnnnnnnnnnnnnnnnnnnnnnnnnnnnnnnnnnnnnnnnnnnnnnnnnnnnnnnnnnnnnnnnnnnnnnnnnnnnnnnnnnnnnnnnnnnnnnnnnnnnnnnnnnnnnnnnnnnnnnnnnnnnnnnnnnnnnnnnnnnnnnnnnnnnnnnnnnnnnnnnnnnnnnnnnnnnnnnnnnnnnnnnnnnnnnnnnnnnnnnnnnnnnnnnnnnnnnnnnnnnnnnnnnnnnnnnnnnnnnnnnnnnnnnnnnnnnnnnnnnnnnnnnnnnnnnnnnnnnnnnnnnnnnnnnnnnnnnnnnnnnnnnnnnnnnnnnnnnnnnnnnnnnnnnnnnnnnnnnnnnnnnnnnnnnnnnnnnnnnnnnnnnnnnnnnnnnnnnnnnnnnnnnnnnnnnnnnnnnnnnnnnnnnnnnnnnnnnnnnnnnnnnnnnnnnnnnnnnnnnnnnnnnnnnnnnnnnnnnnnnnnnnnnnnnnnnnnnnnnnnnnnnnnnnnnnnnnnnnnnnnnnnnnnnnnnnnnnnnnnnnnnnnnnnnnnnnnnnnnnnnnnnnnnnnnnnnnnnnnnnnnnnnnnnnnnnnnnnnnnnnnnnnnnnnnnnnnnnnnnnnnnnnnnnnnnnnnnnnnnnnnnnnnnnnnnnnnnnnnnnnnnnnnnnnnnnnnnnnnnnnnnnnnnnnnnnnnnnnnnnnnnnnnnnnnnnnnnnnnnnnnnnnnnnnnnnnnnnnnnnnnnnnnnnnnnnnnnnnnnnnnnnnnnnnnnnnnnnnnnnnnnnnnnnnnnnnnnnnnnnnnnnnnnnnnnnnnnnnnnnnnnnnnnnnnnnnnnnnnnnnnnnnnnnnnnnnnnnnnnnnnnnnnnnnnnnnnnnnnnnnnnnnnnnnnnnnnnnnnnnnnnnnnnnnnnnnnnnnnnnnnnnnnnnnnnnnnnnnnnnnnnnnnnnnnnnnnnnnnnnnnnnnnnnnnnnnnnnnnnnnnnnnnnnnnnnnnnnnnnnnnnnnnnnnnnnnnnnnnnnnnnnnnnnnnnnnnnnnnnnnnnnnnnnnnnnnnnnnnnnnnnnnnnnnnnnnnnnnnnnnnnnnnnnnnnnnnnnnnnnnnnnnnnnnnnnnnnnnnnnnnnnnnnnnnnnnnnnnnnnnnnnnnnnnnnnnnnnnnnnnnnnnnnnnnnnnnnnnnnnnnnnnnnnnnnnnnnnnnnnnnnnnnnnnnnnnnnnnnnnnnnnnnnnnnnnnnnnnnnnnnnnnnnnnnnnnnnnnnnnnnnnnnnnnnnnnnnnnnnnnnnnnnnnnnnnnnnnnnnnnnnnnnnnnnnnnnnnnnnnnnnnnnnnnnnnnnnnnnnnnnnnnnnnnnnnnnnnnnnnnnnnnnnnnnnnnnnnnnnnnnnnnnnnnnnnnnnnnnnnnnnnnnnnnnnnnnnnnnnnnnnnnnnnnnnnnnnnnnnnnnnnnnnnnnnnnnnnnnnnnnnnnnnnnnnnnnnnnnnnnnnnnnnnnnnnnnnnnnnnnnnnnnnnnnnnnnnnnnnnnnnnnnnnnnnnnnnnnnnnnnnnnnnnnnnnnnnnnnnnnnnnnnnnnnnnnnnnnnnnnnnnnnnnnnnnnnnnnnnnnnnnnnnnnnnnnnnnnnnnnnnnnnnnnnnnnnnnnnnnnnnnnnnnnnnnnnnnnnnnnnnnnnnnnnnnnnnnnnnnnnnnnnnnnnnnnnnnnnnnnnnnnnnnnnnnnnnnnnnnnnnnnnnnnnnnnnnnnnnnnnnnnnnnnnnnnnnnnnnnnnnnnnnnnnnnnnnnnnnnnnnnnnnnnnnnnnnnnnnnnnnnnnnnnnnnnnnnnnnnnnnnnnnnnnnnnnnnnnnnnnnnnnnnnnnnnnnnnnnnnnnnnnnnnnnnnnnnnnnnnnnnnnnnnnnnnnnnnnnnnnnnnnnnnnnnnnnnnnnnnnnnnnnnnnnnnnnnnnnnnnnnnnnnnnnnnnnnnnnnnnnnnnnnnnnnnnnnnnnnnnnnnnnnnnnnnnnnnnnnnnnnnnnnnnnnnnnnnnnnnnnnnnnnnnnnnnnnnnnnnnnnnnnnnnnnnnnnnnnnnnnnnnnnnnnnnnnnnnnnnnnnnnnnnnnnnnnnnnnnnnnnnnnnnnnnnnnnnnnnnnnnnnnnnnnnnnnnnnnnnnnnnnnnnnnnnnnnnnnnnnnnnnnnnnnnnnnnnnnnnnnnnnnnnnnnnnnnnnnnnnnnnnnnnnnnnnnnnnnnnnnnnnnnnnnnnnnnnnnnnnnnnnnnnnnnnnnnnnnnnnnnnnnnnnnnnnnnnnnnnnnnnnnnnnnnnnnnnnnnnnnnnnnnnnnnnnnnnnnnnnnnnnnnnnnnnnnnnnnnnnnnnnnnnnnnnnnnnnnnnnnnnnnnnnnnnnnnnnnnnnnnnnnnnnnnnnnnnnnnnnnnnnnnnnnnnnnnnnnnnnnnnnnnnnnnnnnnnnnnnnnnnnnnnnnnnnnnnnnnnnnnnnnnnnnnnnnnnnnnnnnnnnnnnnnnnnnnnnnnnnnnnnnnnnnnnnnnnnnnnnnnnnnnnnnnnnnnnnnnnnnnnnnnnnnnnnnnnnnnnnnnnnnnnnnnnnnnnnnnnnnnnnnnnnnnnnnnnnnnnnnnnnnnnnnnnnnnnnnnnnnnnnnnnnnnnnnnnnnnnnnnnnnnnnnnnnnnnnnnnnnnnnnnnnnnnnnnnnnnnnnnnnnnnnnnnnnnnnnnnnnnnnnnnnnnnnnnnnnnnnnnnnnnnnnnnnnnnnnnnnnnnnnnnnnnnnnnnnnnnnnnnnnnnnnnnnnnnnnnnnnnnnnnnnnnnnnnnnnnnnnnnnnnnnnnnnnnnnnnnnnnnnnnnnnnnnnnnnnnnnnnnnnnnnnnnnnnnnnnnnnnnnnnnnnnnnnnnnnnnnnnnnnnnnnnnnnnnnnnnnnnnnnnnnnnnnnnnnnnnnnnnnnnnnnnnnnnnnnnnnnnnnnnnnnnnnnnnnnnnnnnnnnnnnnnnnnnnnnnnnnnnnnnnnnnnnnnnnnnnnnnnnnnnnnnnnnnnnnnnnnnnnnnnnnnnnnnnnnnnnnnnnnnnnnnnnnnnnnnnnnnnnnnnnnnnnnnnnnnnnnnnnnnnnnnnnnnnnnnnnnnnnnnnnnnnnnnnnnnnnnnnnnnnnnnnnnnnnnnnnnnnnnnnnnnnnnnnnnnnnnnnnnnnnnnnnnnnnnnnnnnnnnnnnnnnnnnnnnnnnnnnnnnnnnnnnnnnnnnnnnnnnnnnnnnnnnnnnnnnnnnnnnnnnnnnnnnnnnnnnnnnnnnnnnnnnnnnnnnnnnnnnnnnnnnnnnnnnnnnnnnnnnnnnnnnnnnnnnnnnnnnnnnnnnnnnnnnnnnnnnnnnnnnnnnnnnnnnnnnnnnnnnnnnnnnnnnnnnnnnnnnnnnnnnnnnnnnnnnnnnnnnnnnnnnnnnnnnnnnnnnnnnnnnnnnnnnnnnnnnnnnnnnnnnnnnnnnnnnnnnnnnnnnnnnnnnnnnnnnnnnnnnnnnnnnnnnnnnnnnnnnnnnnnnnnnnnnnnnnnnnnnnnnnnnnnnnnnnnnnnnnnnnnnnnnnnnnnnnnnnnnnnnnnnnnnnnnnnnnnnnnnnnnnnnnnnnnnnnnnnnnnnnnnnnnnnnnnnnnnnnnnnnnnnnnnnnnnnnnnnnnnnnnnnnnnnnnnnnnnnnnnnnnnnnnnnnnnnnnnnnnnnnnnnnnnnnnnnnnnnnnnnnnnnnnnnnnnnnnnnnnnnnnnnnnnnnnnnnnnnnnnnnnnnnnnnnnnnnnnnnnnnnnnnnnnnnnnnnnnnnnnnnnnnnnnnnnnnnnnnnnnnnnnnnnnnnnnnnnnnnnnnnnnnnnnnnnnnnnnnnnnnnnnnnnnnnnnnnnnnnnnnnnnnnnnnnnnnnnnnnnnnnnnnnnnnnnnnnnnnnnnnnnnnnnnnnnnnnnnnnnnnnnnnnnnnnnnnnnnnnnnnnnnnnnnnnnnnnnnnnnnnnnnnnnnnnnnnnnnnnnnnnnnnnnnnnnnnnnnnnnnnnnnnnnnnnnnnnnnnnnnnnnnnnnnnnnnnnnnnnnnnnnnnnnnnnnnnnnnnnnnnnnnnnnnnnnnnnnnnnnnnnnnnnnnnnnnnnnnnnnnnnnnnnnnnnnnnnnnnnnnnnnnnnnnnnnnnnnnnnnnnnnnnnnnnnnnnnnnnnnnnnnnnnnnnnnnnnnnnnnnnnnnnnnnnnnnnnnnnnnnnnnnnnnnnnnnnnnnnnnnnnnnnnnnnnnnnnnnnnnnnnnnnnnnnnnnnnnnnnnnnnnnnnnnnnnnnnnnnnnnnnnnnnnnnnnnnnnnnnnnnnnnnnnnnnnnnnnnnnnnnnnnnnnnnnnnnnnnnnnnnnnnnnnnnnnnnnnnnnnnnnnnnnnnnnnnnnnnnnnnnnnnnnnnnnnnnnnnnnnnnnnnnnnnnnnnnnnnnnnnnnnnnnnnnnnnnnnnnnnnnnnnnnnnnnnnnnnnnnnnnnnnnnnnnnnnnnnnnnnnnnnnnnnnnnnnnnnnnnnnnnnnnnnnnnnnnnnnnnnnnnnnnnnnnnnnnnnnnnnnnnnnnnnnnnnnnnnnnnnnnnnnnnnnnnnnnnnnnnnnnnnnnnnnnnnnnnnnnnnnnnnnnnnnnnnnnnnnnnnnnnnnnnnnnnnnnnnnnnnnnnnnnnnnnnnnnnnnnnnnnnnnnnnnnnnnnnnnnnnnnnnnnnnnnnnnnnnnnnnnnnnnnnnnnnnnnnnnnnnnnnnnnnnnnnnnnnnnnnnnnnnnnnnnnnnnnnnnnnnnnnnnnnnnnnnnnnnnnnnnnnnnnnnnnnnnnnnnnnnnnnnnnnnnnnnnnnnnnnnnnnnnnnnnnnnnnnnnnnnnnnnnnnnnnnnnnnnnnnnnnnnnnnnnnnnnnnnnnnnnnnnnnnnnnnnnnnnnnnnnnnnnnnnnnnnnnnnnnnnnnnnnnnnnnnnnnnnnnnnnnnnnnnnnnnnnnnnnnnnnnnnnnnnnnnnnnnnnnnnnnnnnnnnnnnnnnnnnnnnnnnnnnnnnnnnnnnnnnnnnnnnnnnnnnnnnnnnnnnnnnnnnnnnnnnnnnnnnnnnnnnnnnnnnnnnnnnnnnnnnnnnnnnnnnnnnnnnnnnnnnnnnnnnnnnnnnnnnnnnnnnnnnnnnnnnnnnnnnnnnnnnnnnnnnnnnnnnnnnnnnnnnnnnnnnnnnnnnnnnnnnnnnnnnnnnnnnnnnnnnnnnnnnnnnnnnnnnnnnnnnnnnnnnnnnnnnnnnnnnnnnnnnnnnnnnnnnnnnnnnnnnnnnnnnnnnnnnnnnnnnnnnnnnnnnnnnnnnnnnnnnnnnnnnnnnnnnnnnnnnnnnnnnnnnnnnnnnnnnnnnnnnnnnnnnnnnnnnnnnnnnnnnnnnnnnnnnnnnnnnnnnnnnnnnnnnnnnnnnnnnnnnnnnnnnnnnnnnnnnnnnnnnnnnnnnnnnnnnnnnnnnnnnnnnnnnnnnnnnnnnnnnnnnnnnnnnnnnnnnnnnnnnnnnnnnnnnnnnnnnnnnnnnnnnnnnnnnnnnnnnnnnnnnnnnnnnnnnnnnnnnnnnnnnnnnnnnnnnnnnnnnnnnnnnnnnnnnnnnnnnnnnnnnnnnnnnnnnnnnnnnnnnnnnnnnnnnnnnnnnnnnnnnnnnnnnnnnnnnnnnnnnnnnnnnnnnnnnnnnnnnnnnnnnnnnnnnnnnnnnnnnnnnnnnnnnnnnnnnnnnnnnnnnnnnnnnnnnnnnnnnnnnnnnnnnnnnnnnnnnnnnnnnnnnnnnnnnnnnnnnnnnnnnnnnnnnnnnnnnnnnnnnnnnnnnnnnnnnnnnnnnnnnnnnnnnnnnnnnnnnnnnnnnnnnnnnnnnnnnnnnnnnnnnnnnnnnnnnnnnnnnnnnnnnnnnnnnnnnnnnnnnnnnnnnnnnnnnnnnnnnnnnnnnnnnnnnnnnnnnnnnnnnnnnnnnnnnnnnnnnnnnnnnnnnnnnnnnnnnnnnnnnnnnnnnnnnnnnnnnnnnnnnnnnnnnnnnnnnnnnnnnnnnnnnnnnnnnnnnnnnnnnnnnnnnnnnnnnnnnnnnnnnnnnnnnnnnnnnnnnnnnnnnnnnnnnnnnnnnnnnnnnnnnnnnnnnnnnnnnnnnnnnnnnnnnnnnnnnnnnnnnnnnnnnnnnnnnnnnnnnnnnnnnnnnnnnnnnnnnnnnnnnnnnnnnnnnnnnnnnnnnnnnnnnnnnnnnnnnnnnnnnnnnnnnnnnnnnnnnnnnnnnnnnnnnnnnnnnnnnnnnnnnnnnnnnnnnnnnnnnnnnnnnnnnnnnnnnnnnnnnnnnnnnnnnnnnnnnnnnnnnnnnnnnnnnnnnnnnnnnnnnnnnnnnnnnnnnnnnnnnnnnnnnnnnnnnnnnnnnnnnnnnnnnnnnnnnnnnnnnnnnnnnnnnnnnnnnnnnnnnnnnnnnnnnnnnnnnnnnnnnnnnnnnnnnnnnnnnnnnnnnnnnnnnnnnnnnnnnnnnnnnnnnnnnnnnnnnnnnnnnnnnnnnnnnnnnnnnnnnnnnnnnnnnnnnnnnnnnnnnnnnnnnnnnnnnnnnnnnnnnnnnnnnnnnnnnnnnnnnnnnnnnnnnnnnnnnnnnnnnnnnnnnnnnnnnnnnnnnnnnnnnnnnnnnnnnnnnnnnnnnnnnnnnnnnnnnnnnnnnnnnnnnnnnnnnnnnnnnnnnnnnnnnnnnnnnnnnnnnnnnnnnnnnnnnnnnnnnnnnnnnnnnnnnnnnnnnnnnnnnnnnnnnnnnnnnnnnnnnnnnnnnnnnnnnnnnnnnnnnnnnnnnnnnnnnnnnnnnnnnnnnnnnnnnnnnnnnnnnnnnnnnnnnnnnnnnnnnnnnnnnnnnnnnnnnnnnnnnnnnnnnnnnnnnnnnnnnnnnnnnnnnnnnnnnnnnnnnnnnnnnnnnnnnnnnnnnnnnnnnnnnnnnnnnnnnnnnnnnnnnnnnnnnnnnnnnnnnnnnnnnnnnnnnnnnnnnnnnnnnnnnnnnnnnnnnnnnnnnnnnnnnnnnnnnnnnnnnnnnnnnnnnnnnnnnnnnnnnnnnnnnnnnnnnnnnnnnnnnnnnnnnnnnnnnnnnnnnnnnnnnnnnnnnnnnnnnnnnnnnnnnnnnnnnnnnnnnnnnnnnnnnnnnnnnnnnnnnnnnnnnnnnnnnnnnnnnnnnnnnnnnnnnnnnnnnnnnnnnnnnnnnnnnnnnnnnnnnnnnnnnnnnnnnnnnnnnnnnnnnnnnnnnnnnnnnnnnnnnnnnnnnnnnnnnnnnnnnnnnnnnnnnnnnnnnnnnnnnnnnnnnnnnnnnnnnnnnnnnnnnnnnnnnnnnnnnnnnnnnnnnnnnnnnnnnnnnnnnnnnnnnnnnnnnnnnnnnnnnnnnnnnnnnnnnnnnnnnnnnnnnnnnnnnnnnnnnnnnnnnnnnnnnnnnnnnnnnnnnnnnnnnnnnnnnnnnnnnnnnnnnnnnnnnnnnnnnnnnnnnnnnnnnnnnnnnnnnnnnnnnnnnnnnnnnnnnnnnnnnnnnnnnnnnnnnnnnnnnnnnnnnnnnnnnnnnnnnnnnnnnnnnnnnnnnnnnnnnnnnnnnnnnnnnnnnnnnnnnnnnnnnnnnnnnnnnnnnnnnnnnnnnnnnnnnnnnnnnnnnnnnnnnnnnnnnnnnnnnnnnnnnnnnnnnnnnnnnnnnnnnnnnnnnnnnnnnnnnnnnnnnnnnnnnnnnnnnnnnnnnnnnnnnnnnnnnnnnnnnnnnnnnnnnnnnnnnnnnnnnnnnnnnnnnnnnnnnnnnnnnnnnnnnnnnnnnnnnnnnnnnnnnnnnnnnnnnnnnnnnnnnnnnnnnnnnnnnnnnnnnnnnnnnnnnnnnnnnnnnnnnnnnnnnnnnnnnnnnnnnnnnnnnnnnnnnnnnnnnnnnnnnnnnnnnnnnnnnnnnnnnnnnnnnnnnnnnnnnnnnnnnnnnnnnnnnnnnnnnnnnnnnnnnnnnnnnnnnnnnnnnnnnnnnnnnnnnnnnnnnnnnnnnnnnnnnnnnnnnnnnnnnnnnnnnnnnnnnnnnnnnnnnnnnnnnnnnnnnnnnnnnnnnnnnnnnnnnnnnnnnnnnnnnnnnnnnnnnnnnnnnnnnnnnnnnnnnnnnnnnnnnnnnnnnnnnnnnnnnnnnnnnnnnnnnnnnnnnnnnnnnnnnnnnnnnnnnnnnnnnnnnnnnnnnnnnnnnnnnnnnnnnnnnnnnnnnnnnnnnnnnnnnnnnnnnnnnnnnnnnnnnnnnnnnnnnnnnnnnnnnnnnnnnnnnnnnnnnnnnnnnnnnnnnnnnnnnnnnnnnnnnnnnnnnnnnnnnnnnnnnnnnnnnnnnnnnnnnnnnnnnnnnnnnnnnnnnnnnnnnnnnnnnnnnnnnnnnnnnnnnnnnnnnnnnnnnnnnnnnnnnnnnnnnnnnnnnnnnnnnnnnnnnnnnnnnnnnnnnnnnnnnnnnnnnnnnnnnnnnnnnnnnnnnnnnnnnnnnnnnnnnnnnnnnnnnnnnnnnnnnnnnnnnnnnnnnnnnnnnnnnnnnnnnnnnnnnnnnnnnnnnnnnnnnnnnnnnnnnnnnnnnnnnnnnnnnnnnnnnnnnnnnnnnnnnnnnnnnnnnnnnnnnnnnnnnnnnnnnnnnnnnnnnnnnnnnnnnnnnnnnnnnnnnnnnnnnnnnnnnnnnnnnnnnnnnnnnnnnnnnnnnnnnnnnnnnnnnnnnnnnnnnnnnnnnnnnnnnnnnnnnnnnnnnnnnnnnnnnnnnnnnnnnnnnnnnnnnnnnnnnnnnnnnnnnnnnnnnnnnnnnnnnnnnnnnnnnnnnnnnnnnnnnnnnnnnnnnnnnnnnnnnnnnnnnnnnnnnnnnnnnnnnnnnnnnnnnnnnnnnnnnnnnnnnnnnnnnnnnnnnnnnnnnnnnnnnnnnnnnnnnnnnnnnnnnnnnnnnnnnnnnnnnnnnnnnnnnnnnnnnnnnnnnnnnnnnnnnnnnnnnnnnnnnnnnnnnnnnnnnnnnnnnnnnnnnnnnnnnnnnnnnnnnnnnnnnnnnnnnnnnnnnnnnnnnnnnnnnnnnnnnnnnnnnnnnnnnnnnnnnnnnnnnnnnnnnnnnnnnnnnnnnnnnnnnnnnnnnnnnnnnnnnnnnnnnnnnnnnnnnnnnnnnnnnnnnnnnnnnnnnnnnnnnnnnnnnnnnnnnnnnnnnnnnnnnnnnnnnnnnnnnnnnnnnnnnnnnnnnnnnnnnnnnnnnnnnnnnnnnnnnnnnnnnnnnnnnnnnnnnnnnnnnnnnnnnnnnnnnnnnnnnnnnnnnnnnnnnnnnnnnnnnnnnnnnnnnnnnnnnnnnnnnnnnnnnnnnnnnnnnnnnnnnnnnnnnnnnnnnnnnnnnnnnnnnnnnnnnnnnnnnnnnnnnnnnnnnnnnnnnnnnnnnnnnnnnnnnnnnnnnnnnnnnnnnnnnnnnnnnnnnnnnnnnnnnnnnnnnnnnnnnnnnnnnnnnnnnnnnnnnnnnnnnnnnnnnnnnnnnnnnnnnnnnnnnnnnnnnnnnnnnnnnnnnnnnnnnnnnnnnnnnnnnnnnnnnnnnnnnnnnnnnnnnnnnnnnnnnnnnnnnnnnnnnnnnnnnnnnnnnnnnnnnnnnnnnnnnnnnnnnnnnnnnnnnnnnnnnnnnnnnnnnnnnnnnnnnnnnnnnnnnnnnnnnnnnnnnnnnnnnnnnnnnnnnnnnnnnnnnnnnnnnnnnnnnnnnnnnnnnnnnnnnnnnnnnnnnnnnnnnnnnnnnnnnnnnnnnnnnnnnnnnnnnnnnnnnnnnnnnnnnnnnnnnnnnnnnnnnnnnnnnnnnnnnnnnnnnnnnnnnnnnnnnnnnnnnnnnnnnnnnnnnnnnnnnnnnnnnnnnnnnnnnnnnnnnnnnnnnnnnnnnnnnnnnnnnnnnnnnnnnnnnnnnnnnnnnnnnnnnnnnnnnnnnnnnnnnnnnnnnnnnnnnnnnnnnnnnnnnnnnnnnnnnnnnnnnnnnnnnnnnnnnnnnnnnnnnnnnnnnnnnnnnnnnnnnnnnnnnnnnnnnnnnnnnnnnnnnnnnnnnnnnnnnnnnnnnnnnnnnnnnnnnnnnnnnnnnnnnnnnnnnnnnnnnnnnnnnnnnnnnnnnnnnnnnnnnnnnnnnnnnnnnnnnnnnnnnnnnnnnnnnnnnnnnnnnnnnnnnnnnnnnnnnnnnnnnnnnnnnnnnnnnnnnnnnnnnnnnnnnnnnnnnnnnnnnnnnnnnnnnnnnnnnnnnnnnnnnnnnnnnnnnnnnnnnnnnnnnnnnnnnnnnnnnnnnnnnnnnnnnnnnnnnnnnnnnnnnnnnnnnnnnnnnnnnnnnnnnnnnnnnnnnnnnnnnnnnnnnnnnnnnnnnnnnnnnnnnnnnnnnnnnnnnnnnnnnnnnnnnnnnnnnnnnnnnnnnnnnnnnnnnnnnnnnnnnnnnnnnnnnnnnnnnnnnnnnnnnnnnnnnnnnnnnnnnnnnnnnnnnnnnnnnnnnnnnnnnnnnnnnnnnnnnnnnnnnnnnnnnnnnnnnnnnnnnnnnnnnnnnnnnnnnnnnnnnnnnnnnnnnnnnnnnnnnnnnnnnnnnnnnnnnnnnnnnnnnnnnnnnnnnnnnnnnnnnnnnnnnnnnnnnnnnnnnnnnnnnnnnnnnnnnnnnnnnnnnnnnnnnnnnnnnnnnnnnnnnnnnnnnnnnnnnnnnnnnnnnnnnnnnnnnnnnnnnnnnnnnnnnnnnnnnnnnnnnnnnnnnnnnnnnnnnnnnnnnnnnnnnnnnnnnnnnnnnnnnnnnnnnnnnnnnnnnnnnnnnnnnnnnnnnnnnnnnnnnnnnnnnnnnnnnnnnnnnnnnnnnnnnnnnnnnnnnnnnnnnnnnnnnnnnnnnnnnnnnnnnnnnnnnnnnnnnnnnnnnnnnnnnnnnnnnnnnnnnnnnnnnnnnnnnnnnnnnnnnnnnnnnnnnnnnnnnnnnnnnnnnnnnnnnnnnnnnnnnnnnnnnnnnnnnnnnnnnnnnnnnnnnnnnnnnnnnnnnnnnnnnnnnnnnnnnnnnnnnnnnnnnnnnnnnnnnnnnnnnnnnnnnnnnnnnnnnnnnnnnnnnnnnnnnnnnnnnnnnnnnnnnnnnnnnnnnnnnnnnnnnnnnnnnnnnnnnnnnnnnnnnnnnnnnnnnnnnnnnnnnnnnnnnnnnnnnnnnnnnnnnnnnnnnnnnnnnnnnnnnnnnnnnnnnnnnnnnnnnnnnnnnnnnnnnnnnnnnnnnnnnnnnnnnnnnnnnnnnnnnnnnnnnnnnnnnnnnnnnnnnnnnnnnnnnnnnnnnnnnnnnnnnnnnnnnnnnnnnnnnnnnnnnnnnnnnnnnnnnnnnnnnnnnnnnnnnnnnnnnnnnnnnnnnnnnnnnnnnnnnnnnnnnnnnnnnnnnnnnnnnnnnnnnnnnnnnnnnnnnnnnnnnnnnnnnnnnnnnnnnnnnnnnnnnnnnnnnnnnnnnnnnnnnnnnnnnnnnnnnnnnnnnnnnnnnnnnnnnnnnnnnnnnnnnnnnnnnnnnnnnnnnnnnnnnnnnnnnnnnnnnnnnnnnnnnnnnnnnnnnnnnnnnnnnnnnnnnnnnnnnnnnnnnnnnnnnnnnnnnnnnnnnnnnnnnnnnnnnnnnnnnnnnnnnnnnnnnnnnnnnnnnnnnnnnnnnnnnnnnnnnnnnnnnnnnnnnnnnnnnnnnnnnnnnnnnnnnnnnnnnnnnnnnnnnnnnnnnnnnnnnnnnnnnnnnnnnnnnnnnnnnnnnnnnnnnnnnnnnnnnnnnnnnnnnnnnnnnnnnnnnnnnnnnnnnnnnnnnnnnnnnnnnnnnnnnnnnnnnnnnnnnnnnnnnnnnnnnnnnnnnnnnnnnnnnnnnnnnnnnnnnnnnnnnnnnnnnnnnnnnnnnnnnnnnnnnnnnnnnnnnnnnnnnnnnnnnnnnnnnnnnnnnnnnnnnnnnnnnnnnnnnnnnnnnnnnnnnnnnnnnnnnnnnnnnnnnnnnnnnnnnnnnnnnnnnnnnnnnnnnnnnnnnnnnnnnnnnnnnnnnnnnnnnnnnnnnnnnnnnnnnnnnnnnnnnnnnnnnnnnnnnnnnnnnnnnnnnnnnnnnnnnnnnnnnnnnnnnnnnnnnnnnnnnnnnnnnnnnnnnnnnnnnnnnnnnnnnnnnnnnnnnnnnnnnnnnnnnnnnnnnnnnnnnnnnnnnnnnnnnnnnnnnnnnnnnnnnnnnnnnnnnnnnnnnnnnnnnnnnnnnnnnnnnnnnnnnnnnnnnnnnnnnnnnnnnnnnnnnnnnnnnnnnnnnnnnnnnnnnnnnnnnnnnnnnnnnnnnnnnnnnnnnnnnnnnnnnnnnnnnnnnnnnnnnnnnnnnnnnnnnnnnnnnnnnnnnnnnnnnnnnnnnnnnnnnnnnnnnnnnnnnnnnnnnnnnnnnnnnnnnnnnnnnnnnnnnnnnnnnnnnnnnnnnnnnnnnnnnnnnnnnnnnnnnnnnnnnnnnnnnnnnnnnnnnnnnnnnnnnnnnnnnnnnnnnnnnnnnnnnnnnnnnnnnnnnnnnnnnnnnnnnnnnnnnnnnnnnnnnnnnnnnnnnnnnnnnnnnnnnnnnnnnnnnnnnnnnnnnnnnnnnnnnnnnnnnnnnnnnnnnnnnnnnnnnnnnnnnnnnnnnnnnnnnnnnnnnnnnnnnnnnnnnnnnnnnnnnnnnnnnnnnnnnnnnnnnnnnnnnnnnnnnnnnnnnnnnnnnnnnnnnnnnnnnnnnnnnnnnnnnnnnnnnnnnnnnnnnnnnnnnnnnnnnnnnnnnnnnnnnnnnnnnnnnnnnnnnnnnnnnnnnnnnnnnnnnnnnnnnnnnnnnnnnnnnnnnnnnnnnnnnnnnnnnnnnnnnnnnnnnnnnnnnnnnnnnnnnnnnnnnnnnnnnnnnnnnnnnnnnnnnnnnnnnnnnnnnnnnnnnnnnnnnnnnnnnnnnnnnnnnnnnnnnnnnnnnnnnnnnnnnnnnnnnnnnnnnnnnnnnnnnnnnnnnnnnnnnnnnnnnnnnnnnnnnnnnnnnnnnnnnnnnnnnnnnnnnnnnnnnnnnnnnnnnnnnnnnnnnnnnnnnnnnnnnnnnnnnnnnnnnnnnnnnnnnnnnnnnnnnnnnnnnnnnnnnnnnnnnnnnnnnnnnnnnnnnnnnnnnnnnnnnnnnnnnnnnnnnnnnnnnnnnnnnnnnnnnnnnnnnnnnnnnnnnnnnnnnnnnnnnnnnnnnnnnnnnnnnnnnnnnnnnnnnnnnnnnnnnnnnnnnnnnnnnnnnnnnnnnnnnnnnnnnnnnnnnnnnnnnnnnnnnnnnnnnnnnnnnnnnnnnnnnnnnnnnnnnnnnnnnnnnnnnnnnnnnnnnnnnnnnnnnnnnnnnnnnnnnnnnnnnnnnnnnnnnnnnnnnnnnnnnnnnnnnnnnnnnnnnnnnnnnnnnnnnnnnnnnnnnnnnnnnnnnnnnnnnnnnnnnnnnnnnnnnnnnnnnnnnnnnnnnnnnnnnnnnnnnnnnnnnnnnnnnnnnnnnnnnnnnnnnnnnnnnnnnnnnnnnnnnnnnnnnnnnnnnnnnnnnnnnnnnnnnnnnnnnnnnnnnnnnnnnnnnnnnnnnnnnnnnnnnnnnnnnnnnnnnnnnnnnnnnnnnnnnnnnnnnnnnnnnnnnnnnnnnnnnnnnnnnnnnnnnnnnnnnnnnnnnnnnnnnnnnnnnnnnnnnnnnnnnnnnnnnnnnnnnnnnnnnnnnnnnnnnnnnnnnnnnnnnnnnnnnnnnnnnnnnnnnnnnnnnnnnnnnnnnnnnnnnnnnnnnnnnnnnnnnnnnnnnnnnnnnnnnnnnnnnnnnnnnnnnnnnnnnnnnnnnnnnnnnnnnnnnnnnnnnnnnnnnnnnnnnnnnnnnnnnnnnnnnnnnnnnnnnnnnnnnnnnnnnnnnnnnnnnnnnnnnnnnnnnnnnnnnnnnnnnnnnnnnnnnnnnnnnnnnnnnnnnnnnnnnnnnnnnnnnnnnnnnnnnnnnnnnnnnnnnnnnnnnnnnnnnnnnnnnnnnnnnnnnnnnnnnnnnnnnnnnnnnnnnnnnnnnnnnnnnnnnnnnnnnnnnnnnnnnnnnnnnnnnnnnnnnnnnnnnnnnnnnnnnnnnnnnnnnnnnnnnnnnnnnnnnnnnnnnnnnnnnnnnnnnnnnnnnnnnnnnnnnnnnnnnnnnnnnnnnnnnnnnnnnnnnnnnnnnnnnnnnnnnnnnnnnnnnnnnnnnnnnnnnnnnnnnnnnnnnnnnnnnnnnnnnnnnnnnnnnnnnnnnnnnnnnnnnnnnnnnnnnnnnnnnnnnnnnnnnnnnnnnnnnnnnnnnnnnnnnnnnnnnnnnnnnnnnnnnnnnnnnnnnnnnnnnnnnnnnnnnnnnnnnnnnnnnnnnnnnnnnnnnnnnnnnnnnnnnnnnnnnnnnnnnnnnnnnnnnnnnnnnnnnnnnnnnnnnnnnnnnnnnnnnnnnnnnnnnnnnnnnnnnnnnnnnnnnnnnnnnnnnnnnnnnnnnnnnnnnnnnnnnnnnnnnnnnnnnnnnnnnnnnnnnnnnnnnnnnnnnnnnnnnnnnnnnnnnnnnnnnnnnnnnnnnnnnnnnnnnnnnnnnnnnnnnnnnnnnnnnnnnnnnnnnnnnnnnnnnnnnnnnnnnnnnnnnnnnnnnnnnnnnnnnnnnnnnnnnnnnnnnnnnnnnnnnnnnnnnnnnnnnnnnnnnnnnnnnnnnnnnnnnnnnnnnnnnnnnnnnnnnnnnnnnnnnnnnnnnnnnnnnnnnnnnnnnnnnnnnnnnnnnnnnnnnnnnnnnnnnnnnnnnnnnnnnnnnnnnnnnnnnnnnnnnnnnnnnnnnnnnnnnnnnnnnnnnnnnnnnnnnnnnnnnnnnnnnnnnnnnnnnnnnnnnnnnnnnnnnnnnnnnnnnnnnnnnnnnnnnnnnnnnnnnnnnnnnnnnnnnnnnnnnnnnnnnnnnnnnnnnnnnnnnnnnnnnnnnnnnnnnnnnnnnnnnnnnnnnnnnnnnnnnnnnnnnnnnnnnnnnnnnnnnnnnnnnnnnnnnnnnnnnnnnnnnnnnnnnnnnnnnnnnnnnnnnnnnnnnnnnnnnnnnnnnnnnnnnnnnnnnnnnnnnnnnnnnnnnnnnnnnnnnnnnnnnnnnnnnnnnnnnnnnnnnnnnnnnnnnnnnnnnnnnnnnnnnnnnnnnnnnnnnnnnnnnnnnnnnnnnnnnnnnnnnnnnnnnnnnnnnnnnnnnnnnnnnnnnnnnnnnnnnnnnnnnnnnnnnnnnnnnnnnnnnnnnnnnnnnnnnnnnnnnnnnnnnnnnnnnnnnnnnnnnnnnnnnnnnnnnnnnnnnnnnnnnnnnnnnnnnnnnnnnnnnnnnnnnnnnnnnnnnnnnnnnnnnnnnnnnnnnnnnnnnnnnnnnnnnnnnnnnnnnnnnnnnnnnnnnnnnnnnnnnnnnnnnnnnnnnnnnnnnnnnnnnnnnnnnnnnnnnnnnnnnnnnnnnnnnnnnnnnnnnnnnnnnnnnnnnnnnnnnnnnnnnnnnnnnnnnnnnnnnnnnnnnnnnnnnnnnnnnnnnnnnnnnnnnnnnnnnnnnnnnnnnnnnnnnnnnnnnnnnnnnnnnnnnnnnnnnnnnnnnnnnnnnnnnnnnnnnnnnnnnnnnnnnnnnnnnnnnnnnnnnnnnnnnnnnnnnnnnnnnnnnnnnnnnnnnnnnnnnnnnnnnnnnnnnnnnnnnnnnnnnnnnnnnnnnnnnnnnnnnnnnnnnnnnnnnnnnnnnnnnnnnnnnnnnnnnnnnnnnnnnnnnnnnnnnnnnnnnnnnnnnnnnnnnnnnnnnnnnnnnnnnnnnnnnnnnnnnnnnnnnnnnnnnnnnnnnnnnnnnnnnnnnnnnnnnnnnnnnnnnnnnnnnnnnnnnnnnnnnnnnnnnnnnnnnnnnnnnnnnnnnnnnnnnnnnnnnnnnnnnnnnnnnnnnnnnnnnnnnnnnnnnnnnnnnnnnnnnnnnnnnnnnnnnnnnnnnnnnnnnnnnnnnnnnnnnnnnnnnnnnnnnnnnnnnnnnnnnnnnnnnnnnnnnnnnnnnnnnnnnnnnnnnnnnnnnnnnnnnnnnnnnnnnnnnnnnnnnnnnnnnnnnnnnnnnnnnnnnnnnnnnnnnnnnnnnnnnnnnnnnnnnnnnnnnnnnnnnnnnnnnnnnnnnnnnnnnnnnnnnnnnnnnnnnnnnnnnnnnnnnnnnnnnnnnnnnnnnnnnnnnnnnnnnnnnnnnnnnnnnnnnnnnnnnnnnnnnnnnnnnnnnnnnnnnnnnnnnnnnnnnnnnnnnnnnnnnnnnnnnnnnnnnnnnnnnnnnnnnnnnnnnnnnnnnnnnnnnnnnnnnnnnnnnnnnnnnnnnnnnnnnnnnnnnnnnnnnnnnnnnnnnnnnnnnnnnnnnnnnnnnnnnnnnnnnnnnnnnnnnnnnnnnnnnnnnnnnnnnnnnnnnnnnnnnnnnnnnnnnnnnnnnnnnnnnnnnnnnnnnnnnnnnnnnnnnnnnnnnnnnnnnnnnnnnnnnnnnnnnnnnnnnnnnnnnnnnnnnnnnnnnnnnnnnnnnnnnnnnnnnnnnnnnnnnnnnnnnnnnnnnnnnnnnnnnnnnnnnnnnnnnnnnnnnnnnnnnnnnnnnnnnnnnnnnnnnnnnnnnnnnnnnnnnnnnnnnnnnnnnnnnnnnnnnnnnnnnnnnnnnnnnnnnnnnnnnnnnnnnnnnnnnnnnnnnnnnnnnnnnnnnnnnnnnnnnnnnnnnnnnnnnnnnnnnnnnnnnnnnnnnnnnnnnnnnnnnnnnnnnnnnnnnnnnnnnnnnnnnnnnnnnnnnnnnnnnnnnnnnnnnnnnnnnnnnnnnnnnnnnnnnnnnnnnnnnnnnnnnnnnnnnnnnnnnnnnnnnnnnnnnnnnnnnnnnnnnnnnnnnnnnnnnnnnnnnnnnnnnnnnnnnnnnnnnnnnnnnnnnnnnnnnnnnnnnnnnnnnnnnnnnnnnnnnnnnnnnnnnnnnnnnnnnnnnnnnnnnnnnnnnnnnnnnnnnnnnnnnnnnnnnnnnnnnnnnnnnnnnnnnnnnnnnnnnnnnnnnnnnnnnnnnnnnnnnnnnnnnnnnnnnnnnnnnnnnnnnnnnnnnnnnnnnnnnnnnnnnnnnnnnnnnnnnnnnnnnnnnnnnnnnnnnnnnnnnnnnnnnnnnnnnnnnnnnnnnnnnnnnnnnnnnnnnnnnnnnnnnnnnnnnnnnnnnnnnnnnnnnnnnnnnnnnnnnnnnnnnnnnnnnnnnnnnnnnnnnnnnnnnnnnnnnnnnnnnnnnnnnnnnnnnnnnnnnnnnnnnnnnnnnnnnnnnnnnnnnnnnnnnnnnnnnnnnnnnnnnnnnnnnnnnnnnnnnnnnnnnnnnnnnnnnnnnnnnnnnnnnnnnnnnnnnnnnnnnnnnnnnnnnnnnnnnnnnnnnnnnnnnnnnnnnnnnnnnnnnnnnnnnnnnnnnnnnnnnnnnnnnnnnnnnnnnnnnnnnnnnnnnnnnnnnnnnnnnnnnnnnnnnnnnnnnnnnnnnnnnnnnnnnnnnnnnnnnnnnnnnnnnnnnnnnnnnnnnnnnnnnnnnnnnnnnnnnnnnnnnnnnnnnnnnnnnnnnnnnnnnnnnnnnnnnnnnnnnnnnnnnnnnnnnnnnnnnnnnnnnnnnnnnnnnnnnnnnnnnnnnnnnnnnnnnnnnnnnnnnnnnnnnnnnnnnnnnnnnnnnnnnnnnnnnnnnnnnnnnnnnnnnnnnnnnnnnnnnnnnnnnnnnnnnnnnnnnnnnnnnnnnnnnnnnnnnnnnnnnnnnnnnnnnnnnnnnnnnnnnnnnnnnnnnnnnnnnnnnnnnnnnnnnnnnnnnnnnnnnnnnnnnnnnnnnnnnnnnnnnnnnnnnnnnnnnnnnnnnnnnnnnnnnnnnnnnnnnnnnnnnnnnnnnnnnnnnnnnnnnnnnnnnnnnnnnnnnnnnnnnnnnnnnnnnnnnnnnnnnnnnnnnnnnnnnnnnnnnnnnnnnnnnnnnnnnnnnnnnnnnnnnnnnnnnnnnnnnnnnnnnnnnnnnnnnnnnnnnnnnnnnnnnnnnnnnnnnnnnnnnnnnnnnnnnnnnnnnnnnnnnnnnnnnnnnnnnnnnnnnnnnnnnnnnnnnnnnnnnnnnnnnnnnnnnnnnnnnnnnnnnnnnnnnnnnnnnnnnnnnnnnnnnnnnnnnnnnnnnnnnnnnnnnnnnnnnnnnnnnnnnnnnnnnnnnnnnnnnnnnnnnnnnnnnnnnnnnnnnnnnnnnnnnnnnnnnnnnnnnnnnnnnnnnnnnnnnnnnnnnnnnnnnnnnnnnnnnnnnnnnnnnnnnnnnnnnnnnnnnnnnnnnnnnnnnnnnnnnnnnnnnnnnnnnnnnnnnnnnnnnnnnnnnnnnnnnnnnnnnnnnnnnnnnnnnnnnnnnnnnnnnnnnnnnnnnnnnnnnnnnnnnnnnnnnnnnnnnnnnnnnnnnnnnnnnnnnnnnnnnnnnnnnnnnnnnnnnnnnnnnnnnnnnnnnnnnnnnnnnnnnnnnnnnnnnnnnnnnnnnnnnnnnnnnnnnnnnnnnnnnnnnnnnnnnnnnnnnnnnnnnnnnnnnnnnnnnnnnnnnnnnnnnnnnnnnnnnnnnnnnnnnnnnnnnnnnnnnnnnnnnnnnnnnnnnnnnnnnnnnnnnnnnnnnnnnnnnnnnnnnnnnnnnnnnnnnnnnnnnnnnnnnnnnnnnnnnnnnnnnnnnnnnnnnnnnnnnnnnnnnnnnnnnnnnnnnnnnnnnnnnnnnnnnnnnnnnnnnnnnnnnnnnnnnnnnnnnnnnnnnnnnnnnnnnnnnnnnnnnnnnnnnnnnnnnnnnnnnnnnnnnnnnnnnnnnnnnnnnnnnnnnnnnnnnnnnnnnnnnnnnnnnnnnnnnnnnnnnnnnnnnnnnnnnnnnnnnnnnnnnnnnnnnnnnnnnnnnnnnnnnnnnnnnnnnnnnnnnnnnnnnnnnnnnnnnnnnnnnnnnnnnnnnnnnnnnnnnnnnnnnnnnnnnnnnnnnnnnnnnnnnnnnnnnnnnnnnnnnnnnnnnnnnnnnnnnnnnnnnnnnnnnnnnnnnnnnnnnnnnnnnnnnnnnnnnnnnnnnnnnnnnnnnnnnnnnnnnnnnnnnnnnnnnnnnnnnnnnnnnnnnnnnnnnnnnnnnnnnnnnnnnnnnnnnnnnnnnnnnnnnnnnnnnnnnnnnnnnnnnnnnnnnnnnnnnnnnnnnnnnnnnnnnnnnnnnnnnnnnnnnnnnnnnnnnnnnnnnnnnnnnnnnnnnnnnnnnnnnnnnnnnnnnnnnnnnnnnnnnnnnnnnnnnnnnnnnnnnnnnnnnnnnnnnnnnnnnnnnnnnnnnnnnnnnnnnnnnnnnnnnnnnnnnnnnnnnnnnnnnnnnnnnnnnnnnnnnnnnnnnnnnnnnnnnnnnnnnnnnnnnnnnnnnnnnnnnnnnnnnnnnnnnnnnnnnnnnnnnnnnnnnnnnnnnnnnnnnnnnnnnnnnnnnnnnnnnnnnnnnnnnnnnnnnnnnnnnnnnnnnnnnnnnnnnnnnnnnnnnnnnnnnnnnnnnnnnnnnnnnnnnnnnnnnnnnnnnnnnnnnnnnnnnnnnnnnnnnnnnnnnnnnnnnnnnnnnnnnnnnnnnnnnnnnnnnnnnnnnnnnnnnnnnnnnnnnnnnnnnnnnnnnnnnnnnnnnnnnnnnnnnnnnnnnnnnnnnnnnnnnnnnnnnnnnnnnnnnnnnnnnnnnnnnnnnnnnnnnnnnnnnnnnnnnnnnnnnnnnnnnnnnnnnnnnnnnnnnnnnnnnnnnnnnnnnnnnnnnnnnnnnnnnnnnnnnnnnnnnnnnnnnnnnnnnnnnnnnnnnnnnnnnnnnnnnnnnnnnnnnnnnnnnnnnnnnnnnnnnnnnnnnnnnnnnnnnnnnnnnnnnnnnnnnnnnnnnnnnnnnnnnnnnnnnnnnnnnnnnnnnnnnnnnnnnnnnnnnnnnnnnnnnnnnnnnnnnnnnnnnnnnnnnnnnnnnnnnnnnnnnnnnnnnnnnnnnnnnnnnnnnnnnnnnnnnnnnnnnnnnnnnnnnnnnnnnnnnnnnnnnnnnnnnnnnnnnnnnnnnnnnnnnnnnnnnnnnnnnnnnnnnnnnnnnnnnnnnnnnnnnnnnnnnnnnnnnnnnnnnnnnnnnnnnnnnnnnnnnnnnnnnnnnnnnnnnnnnnnnnnnnnnnnnnnnnnnnnnnnnnnnnnnnnnnnnnnnnnnnnnnnnnnnnnnnnnnnnnnnnnnnnnnnnnnnnnnnnnnnnnnnnnnnnnnnnnnnnnnnnnnnnnnnnnnnnnnnnnnnnnnnnnnnnnnnnnnnnnnnnnnnnnnnnnnnnnnnnnnnnnnnnnnnnnnnnnnnnnnnnnnnnnnnnnnnnnnnnnnnnnnnnnnnnnnnnnnnnnnnnnnnnnnnnnnnnnnnnnnnnnnnnnnnnnnnnnnnnnnnnnnnnnnnnnnnnnnnnnnnnnnnnnnnnnnnnnnnnnnnnnnnnnnnnnnnnnnnnnnnnnnnnnnnnnnnnnnnnnnnnnnnnnnnnnnnnnnnnnnnnnnnnnnnnnnnnnnnnnnnnnnnnnnnnnnnnnnnnnnnnnnnnnnnnnnnnnnnnnnnnnnnnnnnnnnnnnnnnnnnnnnnnnnnnnnnnnnnnnnnnnnnnnnnnnnnnnnnnnnnnnnnnnnnnnnnnnnnnnnnnnnnnnnnnnnnnnnnnnnnnnnnnnnnnnnnnnnnnnnnnnnnnnnnnnnnnnnnnnnnnnnnnnnnnnnnnnnnnnnnnnnnnnnnnnnnnnnnnnnnnnnnnnnnnnnnnnnnnnnnnnnnnnnnnnnnnnnnnnnnnnnnnnnnnnnnnnnnnnnnnnnnnnnnnnnnnnnnnnnnnnnnnnnnnnnnnnnnnnnnnnnnnnnnnnnnnnnnnnnnnnnnnnnnnnnnnnnnnnnnnnnnnnnnnnnnnnnnnnnnnnnnnnnnnnnnnnnnnnnnnnnnnnnnnnnnnnnnnnnnnnnnnnnnnnnnnnnnnnnnnnnnnnnnnnnnnnnnnnnnnnnnnnnnnnnnnnnnnnnnnnnnnnnnnnnnnnnnnnnnnnnnnnnnnnnnnnnnnnnnnnnnnnnnnnnnnnnnnnnnnnnnnnnnnnnnnnnnnnnnnnnnnnnnnnnnnnnnnnnnnnnnnnnnnnnnnnnnnnnnnnnnnnnnnnnnnnnnnnnnnnnnnnnnnnnnnnnnnnnnnnnnnnnnnnnnnnnnnnnnnnnnnnnnnnnnnnnnnnnnnnnnnnnnnnnnnnnnnnnnnnnnnnnnnnnnnnnnnnnnnnnnnnnnnnnnnnnnnnnnnnnnnnnnnnnnnnnnnnnnnnnnnnnnnnnnnnnnnnnnnnnnnnnnnnnnnnnnnnnnnnnnnnnnnnnnnnnnnnnnnnnnnnnnnnnnnnnnnnnnnnnnnnnnnnnnnnnnnnnnnnnnnnnnnnnnnnnnnnnnnnnnnnnnnnnnnnnnnnnnnnnnnnnnnnnnnnnnnnnnnnnnnnnnnnnnnnnnnnnnnnnnnnnnnnnnnnnnnnnnnnnnnnnnnnnnnnnnnnnnnnnnnnnnnnnnnnnnnnnnnnnnnnnnnnnnnnnnnnnnnnnnnnnnnnnnnnnnnnnnnnnnnnnnnnnnnnnnnnnnnnnnnnnnnnnnnnnnnnnnnnnnnnnnnnnnnnnnnnnnnnnnnnnnnnnnnnnnnnnnnnnnnnnnnnnnnnnnnnnnnnnnnnnnnnnnnnnnnnnnnnnnnnnnnnnnnnnnnnnnnnnnnnnnnnnnnnnnnnnnnnnnnnnnnnnnnnnnnnnnnnnnnnnnnnnnnnnnnnnnnnnnnnnnnnnnnnnnnnnnnnnnnnnnnnnnnnnnnnnnnnnnnnnnnnnnnnnnnnnnnnnnnnnnnnnnnnnnnnnnnnnnnnnnnnnnnnnnnnnnnnnnnnnnnnnnnnnnnnnnnnnnnnnnnnnnnnnnnnnnnnnnnnnnnnnnnnnnnnnnnnnnnnnnnnnnnnnnnnnnnnnnnnnnnnnnnnnnnnnnnnnnnnnnnnnnnnnnnnnnnnnnnnnnnnnnnnnnnnnnnnnnnnnnnnnnnnnnnnnnnnnnnnnnnnnnnnnnnnnnnnnnnnnnnnnnnnnnnnnnnnnnnnnnnnnnnnnnnnnnnnnnnnnnnnnnnnnnnnnnnnnnnnnnnnnnnnnnnnnnnnnnnnnnnnnnnnnnnnnnnnnnnnnnnnnnnnnnnnnnnnnnnnnnnnnnnnnnnnnnnnnnnnnnnnnnnnnnnnnnnnnnnnnnnnnnnnnnnnnnnnnnnnnnnnnnnnnnnnnnnnnnnnnnnnnnnnnnnnnnnnnnnnnnnnnnnnnnnnnnnnnnnnnnnnnnnnnnnnnnnnnnnnnnnnnnnnnnnnnnnnnnnnnnnnnnnnnnnnnnnnnnnnnnnnnnnnnnnnnnnnnnnnnnnnnnnnnnnnnnnnnnnnnnnnnnnnnnnnnnnnnnnnnnnnnnnnnnnnnnnnnnnnnnnnnnnnnnnnnnnnnnnnnnnnnnnnnnnnnnnnnnnnnnnnnnnnnnnnnnnnnnnnnnnnnnnnnnnnnnnnnnnnnnnnnnnnnnnnnnnnnnnnnnnnnnnnnnnnnnnnnnnnnnnnnnnnnnnnnnnnnnnnnnnnnnnnnnnnnnnnnnnnnnnnnnnnnnnnnnnnnnnnnnnnnnnnnnnnnnnnnnnnnnnnnnnnnnnnnnnnnnnnnnnnnnnnnnnnnnnnnnnnnnnnnnnnnnnnnnnnnnnnnnnnnnnnnnnnnnnnnnnnnnnnnnnnnnnnnnnnnnnnnnnnnnnnnnnnnnnnnnnnnnnnnnnnnnnnnnnnnnnnnnnnnnnnnnnnnnnnnnnnnnnnnnnnnnnnnnnnnnnnnnnnnnnnnnnnnnnnnnnnnnnnnnnnnnnnnnnnnnnnnnnnnnnnnnnnnnnnnnnnnnnnnnnnnnnnnnnnnnnnnnnnnnnnnnnnnnnnnnnnnnnnnnnnnnnnnnnnnnnnnnnnnnnnnnnnnnnnnnnnnnnnnnnnnnnnnnnnnnnnnnnnnnnnnnnnnnnnnnnnnnnnnnnnnnnnnnnnnnnnnnnnnnnnnnnnnnnnnnnnnnnnnnnnnnnnnnnnnnnnnnnnnnnnnnnnnnnnnnnnnnnnnnnnnnnnnnnnnnnnnnnnnnnnnnnnnnnnnnnnnnnnnnnnnnnnnnnnnnnnnnnnnnnnnnnnnnnnnnnnnnnnnnnnnnnnnnnnnnnnnnnnnnnnnnnnnnnnnnnnnnnnnnnnnnnnnnnnnnnnnnnnnnnnnnnnnnnnnnnnnnnnnnnnnnnnnnnnnnnnnnnnnnnnnnnnnnnnnnnnnnnnnnnnnnnnnnnnnnnnnnnnnnnnnnnnnnnnnnnnnnnnnnnnnnnnnnnnnnnnnnnnnnnnnnnnnnnnnnnnnnnnnnnnnnnnnnnnnnnnnnnnnnnnnnnnnnnnnnnnnnnnnnnnnnnnnnnnnnnnnnnnnnnnnnnnnnnnnnnnnnnnnnnnnnnnnnnnnnnnnnnnnnnnnnnnnnnnnnnnnnnnnnnnnnnnnnnnnnnnnnnnnnnnnnnnnnnnnnnnnnnnnnnnnnnnnnnnnnnnnnnnnnnnnnnnnnnnnnnnnnnnnnnnnnnnnnnnnnnnnnnnnnnnnnnnnnnnnnnnnnnnnnnnnnnnnnnnnnnnnnnnnnnnnnnnnnnnnnnnnnnnnnnnnnnnnnnnnnnnnnnnnnnnnnnnnnnnnnnnnnnnnnnnnnnnnnnnnnnnnnnnnnnnnnnnnnnnnnnnnnnnnnnnnnnnnnnnnnnnnnnnnnnnnnnnnnnnnnnnnnnnnnnnnnnnnnnnnnnnnnnnnnnnnnnnnnnnnnnnnnnnnnnnnnnnnnnnnnnnnnnnnnnnnnnnnnnnnnnnnnnnnnnnnnnnnnnnnnnnnnnnnnnnnnnnnnnnnnnnnnnnnnnnnnnnnnnnnnnnnnnnnnnnnnnnnnnnnnnnnnnnnnnnnnnnnnnnnnnnnnnnnnnnnnnnnnnnnnnnnnnnnnnnnnnnnnnnnnnnnnnnnnnnnnnnnnnnnnnnnnnnnnnnnnnnnnnnnnnnnnnnnnnnnnnnnnnnnnnnnnnnnnnnnnnnnnnnnnnnnnnnnnnnnnnnnnnnnnnnnnnnnnnnnnnnnnnnnnnnnnnnnnnnnnnnnnnnnnnnnnnnnnnnnnnnnnnnnnnnnnnnnnnnnnnnnnnnnnnnnnnnnnnnnnnnnnnnnnnnnnnnnnnnnnnnnnnnnnnnnnnnnnnnnnnnnnnnnnnnnnnnnnnnnnnnnnnnnnnnnnnnnnnnnnnnnnnnnnnnnnnnnnnnnnnnnnnnnnnnnnnnnnnnnnnnnnnnnnnnnnnnnnnnnnnnnnnnnnnnnnnnnnnnnnnnnnnnnnnnnnnnnnnnnnnnnnnnnnnnnnnnnnnnnnnnnnnnnnnnnnnnnnnnnnnnnnnnnnnnnnnnnnnnnnnnnnnnnnnnnnnnnnnnnnnnnnnnnnnnnnnnnnnnnnnnnnnnnnnnnnnnnnnnnnnnnnnnnnnnnnnnnnnnnnnnnnnnnnnnnnnnnnnnnnnnnnnnnnnnnnnnnnnnnnnnnnnnnnnnnnnnnnnnnnnnnnnnnnnnnnnnnnnnnnnnnnnnnnnnnnnnnnnnnnnnnnnnnnnnnnnnnnnnnnnnnnnnnnnnnnnnnnnnnnnnnnnnnnnnnnnnnnnnnnnnnnnnnnnnnnnnnnnnnnnnnnnnnnnnnnnnnnnnnnnnnnnnnnnnnnnnnnnnnnnnnnnnnnnnnnnnnnnnnnnnnnnnnnnnnnnnnnnnnnnnnnnnnnnnnnnnnnnnnnnnnnnnnnnnnnnnnnnnnnnnnnnnnnnnnnnnnnnnnnnnnnnnnnnnnnnnnnnnnnnnnnnnnnnnnnnnnnnnnnnnnnnnnnnnnnnnnnnnnnnnnnnnnnnnnnnnnnnnnnnnnnnnnnnnnnnnnnnnnnnnnnnnnnnnnnnnnnnnnnnnnnnnnnnnnnnnnnnnnnnnnnnnnnnnnnnnnnnnnnnnnnnnnnnnnnnnnnnnnnnnnnnnnnnnnnnnnnnnnnnnnnnnnnnnnnnnnnnnnnnnnnnnnnnnnnnnnnnnnnnnnnnnnnnnnnnnnnnnnnnnnnnnnnnnnnnnnnnnnnnnnnnnnnnnnnnnnnnnnnnnnnnnnnnnnnnnnnnnnnnnnnnnnnnnnnnnnnnnnnnnnnnnnnnnnnnnnnnnnnnnnnnnnnnnnnnnnnnnnnnnnnnnnnnnnnnnnnnnnnnnnnnnnnnnnnnnnnnnnnnnnnnnnnnnnnnnnnnnnnnnnnnnnnnnnnnnnnnnnnnnnnnnnnnnnnnnnnnnnnnnnnnnnnnnnnnnnnnnnnnnnnnnnnnnnnnnnnnnnnnnnnnnnnnnnnnnnnnnnnnnnnnnnnnnnnnnnnnnnnnnnnnnnnnnnnnnnnnnnnnnnnnnnnnnnnnnnnnnnnnnnnnnnnnnnnnnnnnnnnnnnnnnnnnnnnnnnnnnnnnnnnnnnnnnnnnnnnnnnnnnnnnnnnnnnnnnnnnnnnnnnnnnnnnnnnnnnnnnnnnnnnnnnnnnnnnnnnnnnnnnnnnnnnnnnnnnnnnnnnnnnnnnnnnnnnnnnnnnnnnnnnnnnnnnnnnnnnnnnnnnnnnnnnnnnnnnnnnnnnnnnnnnnnnnnnnnnnnnnnnnnnnnnnnnnnnnnnnnnnnnnnnnnnnnnnnnnnnnnnnnnnnnnnnnnnnnnnnnnnnnnnnnnnnnnnnnnnnnnnnnnnnnnnnnnnnnnnnnnnnnnnnnnnnnnnnnnnnnnnnnnnnnnnnnnnnnnnnnnnnnnnnnnnnnnnnnnnnnnnnnnnnnnnnnnnnnnnnnnnnnnnnnnnnnnnnnnnnnnnnnnnnnnnnnnnnnnnnnnnnnnnnnnnnnnnnnnnnnnnnnnnnnnnnnnnnnnnnnnnnnnnnnnnnnnnnnnnnnnnnnnnnnnnnnnnnnnnnnnnnnnnnnnnnnnnnnnnnnnnnnnnnnnnnnnnnnnnnnnnnnnnnnnnnnnnnnnnnnnnnnnnnnnnnnnnnnnnnnnnnnnnnnnnnnnnnnnnnnnnnnnnnnnnnnnnnnnnnnnnnnnnnnnnnnnnnnnnnnnnnnnnnnnnnnnnnnnnnnnnnnnnnnnnnnnnnnnnnnnnnnnnnnnnnnnnnnnnnnnnnnnnnnnnnnnnnnnnnnnnnnnnnnnnnnnnnnnnnnnnnnnnnnnnnnnnnnnnnnnnnnnnnnnnnnnnnnnnnnnnnnnnnnnnnnnnnnnnnnnnnnnnnnnnnnnnnnnnnnnnnnnnnnnnnnnnnnnnnnnnnnnnnnnnnnnnnnnnnnnnnnnnnnnnnnnnnnnnnnnnnnnnnnnnnnnnnnnnnnnnnnnnnnnnnnnnnnnnnnnnnnnnnnnnnnnnnnnnnnnnnnnnnnnnnnnnnnnnnnnnnnnnnnnnnnnnnnnnnnnnnnnnnnnnnnnnnnnnnnnnnnnnnnnnnnnnnnnnnnnnnnnnnnnnnnnnnnnnnnnnnnnnnnnnnnnnnnnnnnnnnnnnnnnnnnnnnnnnnnnnnnnnnnnnnnnnnnnnnnnnnnnnnnnnnnnnnnnnnnnnnnnnnnnnnnnnnnnnnnnnnnnnnnnnnnnnnnnnnnnnnnnnnnnnnnnnnnnnnnnnnnnnnnnnnnnnnnnnnnnnnnnnnnnnnnnnnnnnnnnnnnnnnnnnnnnnnnnnnnnnnnnnnnnnnnnnnnnnnnnnnnnnnnnnnnnnnnnnnnnnnnnnnnnnnnnnnnnnnnnnnnnnnnnnnnnnnnnnnnnnnnnnnnnnnnnnnnnnnnnnnnnnnnnnnnnnnnnnnnnnnnnnnnnnnnnnnnnnnnnnnnnnnnnnnnnnnnnnnnnnnnnnnnnnnnnnnnnnnnnnnnnnnnnnnnnnnnnnnnnnnnnnnnnnnnnnnnnnnnnnnnnnnnnnnnnnnnnnnnnnnnnnnnnnnnnnnnnnnnnnnnnnnnnnnnnnnnnnnnnnnnnnnnnnnnnnnnnnnnnnnnnnnnnnnnnnnnnnnnnnnnnnnnnnnnnnnnnnnnnnnnnnnnnnnnnnnnnnnnnnnnnnnnnnnnnnnnnnnnnnnnnnnnnnnnnnnnnnnnnnnnnnnnnnnnnnnnnnnnnnnnnnnnnnnnnnnnnnnnnnnnnnnnnnnnnnnnnnnnnnnnnnnnnnnnnnnnnnnnnnnnnnnnnnnnnnnnnnnnnnnnnnnnnnnnnnnnnnnnnnnnnnnnnnnnnnnnnnnnnnnnnnnnnnnnnnnnnnnnnnnnnnnnnnnnnnnnnnnnnnnnnnnnnnnnnnnnnnnnnnnnnnnnnnnnnnnnnnnnnnnnnnnnnnnnnnnnnnnnnnnnnnnnnnnnnnnnnnnnnnnnnnnnnnnnnnnnnnnnnnnnnnnnnnnnnnnnnnnnnnnnnnnnnnnnnnnnnnnnnnnnnnnnnnnnnnnnnnnnnnnnnnnnnnnnnnnnnnnnnnnnnnnnnnnnnnnnnnnnnnnnnnnnnnnnnnnnnnnnnnnnnnnnnnnnnnnnnnnnnnnnnnnnnnnnnnnnnnnnnnnnnnnnnnnnnnnnnnnnnnnnnnnnnnnnnnnnnnnnnnnnnnnnnnnnnnnnnnnnnnnnnnnnnnnnnnnnnnnnnnnnnnnnnnnnnnnnnnnnnnnnnnnnnnnnnnnnnnnnnnnnnnnnnnnnnnnnnnnnnnnnnnnnnnnnnnnnnnnnnnnnnnnnnnnnnnnnnnnnnnnnnnnnnnnnnnnnnnnnnnnnnnnnnnnnnnnnnnnnnnnnnnnnnnnnnnnnnnnnnnnnnnnnnnnnnnnnnnnnnnnnnnnnnnnnnnnnnnnnnnnnnnnnnnnnnnnnnnnnnnnnnnnnnnnnnnnnnnnnnnnnnnnnnnnnnnnnnnnnnnnnnnnnnnnnnnnnnnnnnnnnnnnnnnnnnnnnnnnnnnnnnnnnnnnnnnnnnnnnnnnnnnnnnnnnnnnnnnnnnnnnnnnnnnnnnnnnnnnnnnnnnnnnnnnnnnnnnnnnnnnnnnnnnnnnnnnnnnnnnnnnnnnnnnnnnnnnnnnnnnnnnnnnnnnnnnnnnnnnnnnnnnnnnnnnnnnnnnnnnnnnnnnnnnnnnnnnnnnnnnnnnnnnnnnnnnnnnnnnnnnnnnnnnnnnnnnnnnnnnnnnnnnnnnnnnnnnnnnnnnnnnnnnnnnnnnnnnnnnnnnnnnnnnnnnnnnnnnnnnnnnnnnnnnnnnnnnnnnnnnnnnnnnnnnnnnnnnnnnnnnnnnnnnnnnnnnnnnnnnnnnnnnnnnnnnnnnnnnnnnnnnnnnnnnnnnnnnnnnnnnnnnnnnnnnnnnnnnnnnnnnnnnnnnnnnnnnnnnnnnnnnnnnnnnnnnnnnnnnnnnnnnnnnnnnnnnnnnnnnnnnnnnnnnnnnnnnnnnnnnnnnnnnnnnnnnnnnnnnnnnnnnnnnnnnnnnnnnnnnnnnnnnnnnnnnnnnnnnnnnnnnnnnnnnnnnnnnnnnnnnnnnnnnnnnnnnnnnnnnnnnnnnnnnnnnnnnnnnnnnnnnnnnnnnnnnnnnnnnnnnnnnnnnnnnnnnnnnnnnnnnnnnnnnnnnnnnnnnnnnnnnnnnnnnnnnnnnnnnnnnnnnnnnnnnnnnnnnnnnnnnnnnnnnnnnnnnnnnnnnnnnnnnnnnnnnnnnnnnnnnnnnnnnnnnnnnnnnnnnnnnnnnnnnnnnnnnnnnnnnnnnnnnnnnnnnnnnnnnnnnnnnnnnnnnnnnnnnnnnnnnnnnnnnnnnnnnnnnnnnnnnnnnnnnnnnnnnnnnnnnnnnnnnnnnnnnnnnnnnnnnnnnnnnnnnnnnnnnnnnnnnnnnnnnnnnnnnnnnnnnnnnnnnnnnnnnnnnnnnnnnnnnnnnnnnnnnnnnnnnnnnnnnnnnnnnnnnnnnnnnnnnnnnnnnnnnnnnnnnnnnnnnnnnnnnnnnnnnnnnnnnnnnnnnnnnnnnnnnnnnnnnnnnnnnnnnnnnnnnnnnnnnnnnnnnnnnnnnnnnnnnnnnnnnnnnnnnnnnnnnnnnnnnnnnnnnnnnnnnnnnnnnnnnnnnnnnnnnnnnnnnnnnnnnnnnnnnnnnnnnnnnnnnnnnnnnnnnnnnnnnnnnnnnnnnnnnnnnnnnnnnnnnnnnnnnnnnnnnnnnnnnnnnnnnnnnnnnnnnnnnnnnnnnnnnnnnnnnnnnnnnnnnnnnnnnnnnnnnnnnnnnnnnnnnnnnnnnnnnnnnnnnnnnnnnnnnnnnnnnnnnnnnnnnnnnnnnnnnnnnnnnnnnnnnnnnnnnnnnnnnnnnnnnnnnnnnnnnnnnnnnnnnnnnnnnnnnnnnnnnnnnnnnnnnnnnnnnnnnnnnnnnnnnnnnnnnnnnnnnnnnnnnnnnnnnnnnnnnnnnnnnnnnnnnnnnnnnnnnnnnnnnnnnnnnnnnnnnnnnnnnnnnnnnnnnnnnnnnnnnnnnnnnnnnnnnnnnnnnnnnnnnnnnnnnnnnnnnnnnnnnnnnnnnnnnnnnnnnnnnnnnnnnnnnnnnnnnnnnnnnnnnnnnnnnnnnnnnnnnnnnnnnnnnnnnnnnnnnnnnnnnnnnnnnnnnnnnnnnnnnnnnnnnnnnnnnnnnnnnnnnnnnnnnnnnnnnnnnnnnnnnnnnnnnnnnnnnnnnnnnnnnnnnnnnnnnnnnnnnnnnnnnnnnnnnnnnnnnnnnnnnnnnnnnnnnnnnnnnnnnnnnnnnnnnnnnnnnnnnnnnnnnnnnnnnnnnnnnnnnnnnnnnnnnnnnnnnnnnnnnnnnnnnnnnnnnnnnnnnnnnnnnnnnnnnnnnnnnnnnnnnnnnnnnnnnnnnnnnnnnnnnnnnnnnnnnnnnnnnnnnnnnnnnnnnnnnnnnnnnnnnnnnnnnnnnnnnnnnnnnnnnnnnnnnnnnnnnnnnnnnnnnnnnnnnnnnnnnnnnnnnnnnnnnnnnnnnnnnnnnnnnnnnnnnnnnnnnnnnnnnnnnnnnnnnnnnnnnnnnnnnnnnnnnnnnnnnnnnnnnnnnnnnnnnnnnnnnnnnnnnnnnnnnnnnnnnnnnnnnnnnnnnnnnnnnnnnnnnnnnnnnnnnnnnnnnnnnnnnnnnnnnnnnnnnnnnnnnnnnnnnnnnnnnnnnnnnnnnnnnnnnnnnnnnnnnnnnnnnnnnnnnnnnnnnnnnnnnnnnnnnnnnnnnnnnnnnnnnnnnnnnnnnnnnnnnnnnnnnnnnnnnnnnnnnnnnnnnnnnnnnnnnnnnnnnnnnnnnnnnnnnnnnnnnnnnnnnnnnnnnnnnnnnnnnnnnnnnnnnnnnnnnnnnnnnnnnnnnnnnnnnnnnnnnnnnnnnnnnnnnnnnnnnnnnnnnnnnnnnnnnnnnnnnnnnnnnnnnnnnnnnnnnnnnnnnnnnnnnnnnnnnnnnnnnnnnnnnnnnnnnnnnnnnnnnnnnnnnnnnnnnnnnnnnnnnnnnnnnnnnnnnnnnnnnnnnnnnnnnnnnnnnnnnnnnnnnnnnnnnnnnnnnnnnnnnnnnnnnnnnnnnnnnnnnnnnnnnnnnnnnnnnnnnnnnnnnnnnnnnnnnnnnnnnnnnnnnnnnnnnnnnnnnnnnnnnnnnnnnnnnnnnnnnnnnnnnnnnnnnnnnnnnnnnnnnnnnnnnnnnnnnnnnnnnnnnnnnnnnnnnnnnnnnnnnnnnnnnnnnnnnnnnnnnnnnnnnnnnnnnnnnnnnnnnnnnnnnnnnnnnnnnnnnnnnnnnnnnnnnnnnnnnnnnnnnnnnnnnnnnnnnnnnnnnnnnnnnnnnnnnnnnnnnnnnnnnnnnnnnnnnnnnnnnnnnnnnnnnnnnnnnnnnnnnnnnnnnnnnnnnnnnnnnnnnnnnnnnnnnnnnnnnnnnnnnnnnnnnnnnnnnnnnnnnnnnnnnnnnnnnnnnnnnnnnnnnnnnnnnnnnnnnnnnnnnnnnnnnnnnnnnnnnnnnnnnnnnnnnnnnnnnnnnnnnnnnnnnnnnnnnnnnnnnnnnnnnnnnnnnnnnnnnnnnnnnnnnnnnnnnnnnnnnnnnnnnnnnnnnnnnnnnnnnnnnnnnnnnnnnnnnnnnnnnnnnnnnnnnnnnnnnnnnnnnnnnnnnnnnnnnnnnnnnnnnnnnnnnnnnnnnnnnnnnnnnnnnnnnnnnnnnnnnnnnnnnnnnnnnnnnnnnnnnnnnnnnnnnnnnnnnnnnnnnnnnnnnnnnnnnnnnnnnnnnnnnnnnnnnnnnnnnnnnnnnnnnnnnnnnnnnnnnnnnnnnnnnnnnnnnnnnnnnnnnnnnnnnnnnnnnnnnnnnnnnnnnnnnnnnnnnnnnnnnnnnnnnnnnnnnnnnnnnnnnnnnnnnnnnnnnnnnnnnnnnnnnnnnnnnnnnnnnnnnnnnnnnnnnnnnnnnnnnnnnnnnnnnnnnnnnnnnnnnnnnnnnnnnnnnnnnnnnnnnnnnnnnnnnnnnnnnnnnnnnnnnnnnnnnnnnnnnnnnnnnnnnnnnnnnnnnnnnnnnnnnnnnnnnnnnnnnnnnnnnnnnnnnnnnnnnnnnnnnnnnnnnnnnnnnnnnnnnnnnnnnnnnnnnnnnnnnnnnnnnnnnnnnnnnnnnnnnnnnnnnnnnnnnnnnnnnnnnnnnnnnnnnnnnnnnnnnnnnnnnnnnnnnnnnnnnnnnnnnnnnnnnnnnnnnnnnnnnnnnnnnnnnnnnnnnnnnnnnnnnnnnnnnnnnnnnnnnnnnnnnnnnnnnnnnnnnnnnnnnnnnnnnnnnnnnnnnnnnnnnnnnnnnnnnnnnnnnnnnnnnnnnnnnnnnnnnnnnnnnnnnnnnnnnnnnnnnnnnnnnnnnnnnnnnnnnnnnnnnnnnnnnnnnnnnnnnnnnnnnnnnnnnnnnnnnnnnnnnnnnnnnnnnnnnnnnnnnnnnnnnnnnnnnnnnnnnnnnnnnnnnnnnnnnnnnnnnnnnnnnnnnnnnnnnnnnnnnnnnnnnnnnnnnnnnnnnnnnnnnnnnnnnnnnnnnnnnnnnnnnnnnnnnnnnnnnnnnnnnnnnnnnnnnnnnnnnnnnnnnnnnnnnnnnnnnnnnnnnnnnnnnnnnnnnnnnnnnnnnnnnnnnnnnnnnnnnnnnnnnnnnnnnnnnnnnnnnnnnnnnnnnnnnnnnnnnnnnnnnnnnnnnnnnnnnnnnnnnnnnnnnnnnnnnnnnnnnnnnnnnnnnnnnnnnnnnnnnnnnnnnnnnnnnnnnnnnnnnnnnnnnnnnnnnnnnnnnnnnnnnnnnnnnnnnnnnnnnnnnnnnnnnnnnnnnnnnnnnnnnnnnnnnnnnnnnnnnnnnnnnnnnnnnnnnnnnnnnnnnnnnnnnnnnnnnnnnnnnnnnnnnnnnnnnnnnnnnnnnnnnnnnnnnnnnnnnnnnnnnnnnnnnnnnnnnnnnnnnnnnnnnnnnnnnnnnnnnnnnnnnnnnnnnnnnnnnnnnnnnnnnnnnnnnnnnnnnnnnnnnnnnnnnnnnnnnnnnnnnnnnnnnnnnnnnnnnnnnnnnnnnnnnnnnnnnnnnnnnnnnnnnnnnnnnnnnnnnnnnnnnnnnnnnnnnnnnnnnnnnnnnnnnnnnnnnnnnnnnnnnnnnnnnnnnnnnnnnnnnnnnnnnnnnnnnnnnnnnnnnnnnnnnnnnnnnnnnnnnnnnnnnnnnnnnnnnnnnnnnnnnnnnnnnnnnnnnnnnnnnnnnnnnnnnnnnnnnnnnnnnnnnnnnnnnnnnnnnnnnnnnnnnnnnnnnnnnnnnnnnnnnnnnnnnnnnnnnnnnnnnnnnnnnnnnnnnnnnnnnnnnnnnnnnnnnnnnnnnnnnnnnnnnnnnnnnnnnnnnnnnnnnnnnnnnnnnnnnnnnnnnnnnnnnnnnnnnnnnnnnnnnnnnnnnnnnnnnnnnnnnnnnnnnnnnnnnnnnnnnnnnnnnnnnnnnnnnnnnnnnnnnnnnnnnnnnnnnnnnnnnnnnnnnnnnnnnnnnnnnnnnnnnnnnnnnnnnnnnnnnnnnnnnnnnnnnnnnnnnnnnnnnnnnnnnnnnnnnnnnnnnnnnnnnnnnnnnnnnnnnnnnnnnnnnnnnnnnnnnnnnnnnnnnnnnnnnnnnnnnnnnnnnnnnnnnnnnnnnnnnnnnnnnnnnnnnnnnnnnnnnnnnnnnnnnnnnnnnnnnnnnnnnnnnnnnnnnnnnnnnnnnnnnnnnnnnnnnnnnnnnnnnnnnnnnnnnnnnnnnnnnnnnnnnnnnnnnnnnnnnnnnnnnnnnnnnnnnnnnnnnnnnnnnnnnnnnnnnnnnnnnnnnnnnnnnnnnnnnnnnnnnnnnnnnnnnnnnnnnnnnnnnnnnnnnnnnnnnnnnnnnnnnnnnnnnnnnnnnnnnnnnnnnnnnnnnnnnnnnnnnnnnnnnnnnnnnnnnnnnnnnnnnnnnnnnnnnnnnnnnnnnnnnnnnnnnnnnnnnnnnnnnnnnnnnnnnnnnnnnnnnnnnnnnnnnnnnnnnnnnnnnnnnnnnnnnnnnnnnnnnnnnnnnnnnnnnnnnnnnnnnnnnnnnnnnnnnnnnnnnnnnnnnnnnnnnnnnnnnnnnnnnnnnnnnnnnnnnnnnnnnnnnnnnnnnnnnnnnnnnnnnnnnnnnnnnnnnnnnnnnnnnnnnnnnnnnnnnnnnnnnnnnnnnnnnnnnnnnnnnnnnnnnnnnnnnnnnnnnnnnnnnnnnnnnnnnnnnnnnnnnnnnnnnnnnnnnnnnnnnnnnnnnnnnnnnnnnnnnnnnnnnnnnnnnnnnnnnnnnnnnnnnnnnnnnnnnnnnnnnnnnnnnnnnnnnnnnnnnnnnnnnnnnnnnnnnnnnnnnnnnnnnnnnnnnnnnnnnnnnnnnnnnnnnnnnnnnnnnnnnnnnnnnnnnnnnnnnnnnnnnnnnnnnnnnnnnnnnnnnnnnnnnnnnnnnnnnnnnnnnnnnnnnnnnnnnnnnnnnnnnnnnnnnnnnnnnnnnnnnnnnnnnnnnnnnnnnnnnnnnnnnnnnnnnnnnnnnnnnnnnnnnnnnnnnnnnnnnnnnnnnnnnnnnnnnnnnnnnnnnnnnnnnnnnnnnnnnnnnnnnnnnnnnnnnnnnnnnnnnnnnnnnnnnnnnnnnnnnnnnnnnnnnnnnnnnnnnnnnnnnnnnnnnnnnnnnnnnnnnnnnnnnnnnnnnnnnnnnnnnnnnnnnnnnnnnnnnnnnnnnnnnnnnnnnnnnnnnnnnnnnnnnnnnnnnnnnnnnnnnnnnnnnnnnnnnnnnnnnnnnnnnnnnnnnnnnnnnnnnnnnnnnnnnnnnnnnnnnnnnnnnnnnnnnnnnnnnnnnnnnnnnnnnnnnnnnnnnnnnnnnnnnnnnnnnnnnnnnnnnnnnnnnnnnnnnnnnnnnnnnnnnnnnnnnnnnnnnnnnnnnnnnnnnnnnnnnnnnnnnnnnnnnnnnnnnnnnnnnnnnnnnnnnnnnnnnnnnnnnnnnnnnnnnnnnnnnnnnnnnnnnnnnnnnnnnnnnnnnnnnnnnnnnnnnnnnnnnnnnnnnnnnnnnnnnnnnnnnnnnnnnnnnnnnnnnnnnnnnnnnnnnnnnnnnnnnnnnnnnnnnnnnnnnnnnnnnnnnnnnnnnnnnnnnnnnnnnnnnnnnnnnnnnnnnnnnnnnnnnnnnnnnnnnnnnnnnnnnnnnnnnnnnnnnnnnnnnnnnnnnnnnnnnnnnnnnnnnnnnnnnnnnnnnnnnnnnnnnnnnnnnnnnnnnnnnnnnnnnnnnnnnnnnnnnnnnnnnnnnnnnnnnnnnnnnnnnnnnnnnnnnnnnnnnnnnnnnnnnnnnnnnnnnnnnnnnnnnnnnnnnnnnnnnnnnnnnnnnnnnnnnnnnnnnnnnnnnnnnnnnnnnnnnnnnnnnnnnnnnnnnnnnnnnnnnnnnnnnnnnnnnnnnnnnnnnnnnnnnnnnnnnnnnnnnnnnnnnnnnnnnnnnnnnnnnnnnnnnnnnnnnnnnnnnnnnnnnnnnnnnnnnnnnnnnnnnnnnnnnnnnnnnnnnnnnnnnnnnnnnnnnnnnnnnnnnnnnnnnnnnnnnnnnnnnnnnnnnnnnnnnnnnnnnnnnnnnnnnnnnnnnnnnnnnnnnnnnnnnnnnnnnnnnnnnnnnnnnnnnnnnnnnnnnnnnnnnnnnnnnnnnnnnnnnnnnnnnnnnnnnnnnnnnnnnnnnnnnnnnnnnnnnnnnnnnnnnnnnnnnnnnnnnnnnnnnnnnnnnnnnnnnnnnnnnnnnnnnnnnnnnnnnnnnnnnnnnnnnnnnnnnnnnnnnnnnnnnnnnnnnnnnnnnnnnnnnnnnnnnnnnnnnnnnnnnnnnnnnnnnnnnnnnnnnnnnnnnnnnnnnnnnnnnnnnnnnnnnnnnnnnnnnnnnnnnnnnnnnnnnnnnnnnnnnnnnnnnnnnnnnnnnnnnnnnnnnnnnnnnnnnnnnnnnnnnnnnnnnnnnnnnnnnnnnnnnnnnnnnnnnnnnnnnnnnnnnnnnnnnnnnnnnnnnnnnnnnnnnnnnnnnnnnnnnnnnnnnnnnnnnnnnnnnnnnnnnnnnnnnnnnnnnnnnnnnnnnnnnnnnnnnnnnnnnnnnnnnnnnnnnnnnnnnnnnnnnnnnnnnnnnnnnnnnnnnnnnnnnnnnnnnnnnnnnnnnnnnnnnnnnnnnnnnnnnnnnnnnnnnnnnnnnnnnnnnnnnnnnnnnnnnnnnnnnnnnnnnnnnnnnnnnnnnnnnnnnnnnnnnnnnnnnnnnnnnnnnnnnnnnnnnnnnnnnnnnnnnnnnnnnnnnnnnnnnnnnnnnnnnnnnnnnnnnnnnnnnnnnnnnnnnnnnnnnnnnnnnnnnnnnnnnnnnnnnnnnnnnnnnnnnnnnnnnnnnnnnnnnnnnnnnnnnnnnnnnnnnnnnnnnnnnnnnnnnnnnnnnnnnnnnnnnnnnnnnnnnnnnnnnnnnnnnnnnnnnnnnnnnnnnnnnnnnnnnnnnnnnnnnnnnnnnnnnnnnnnnnnnnnnnnnnnnnnnnnnnnnnnnnnnnnnnnnnnnnnnnnnnnnnnnnnnnnnnnnnnnnnnnnnnnnnnnnnnnnnnnnnnnnnnnnnnnnnnnnnnnnnnnnnnnnnnnnnnnnnnnnnnnnnnnnnnnnnnnnnnnnnnnnnnnnnnnnnnnnnnnnnnnnnnnnnnnnnnnnnnnnnnnnnnnnnnnnnnnnnnnnnnnnnnnnnnnnnnnnnnnnnnnnnnnnnnnnnnnnnnnnnnnnnnnnnnnnnnnnnnnnnnnnnnnnnnnnnnnnnnnnnnnnnnnnnnnnnnnnnnnnnnnnnnnnnnnnnnnnnnnnnnnnnnnnnnnnnnnnnnnnnnnnnnnnnnnnnnnnnnnnnnnnnnnnnnnnnnnnnnnnnnnnnnnnnnnnnnnnnnnnnnnnnnnnnnnnnnnnnnnnnnnnnnnnnnnnnnnnnnnnnnnnnnnnnnnnnnnnnnnnnnnnnnnnnnnnnnnnnnnnnnnnnnnnnnnnnnnnnnnnnnnnnnnnnnnnnnnnnnnnnnnnnnnnnnnnnnnnnnnnnnnnnnnnnnnnnnnnnnnnnnnnnnnnnnnnnnnnnnnnnnnnnnnnnnnnnnnnnnnnnnnnnnnnnnnnnnnnnnnnnnnnnnnnnnnnnnnnnnnnnnnnnnnnnnnnnnnnnnnnnnnnnnnnnnnnnnnnnnnnnnnnnnnnnnnnnnnnnnnnnnnnnnnnnnnnnnnnnnnnnnnnnnnnnnnnnnnnnnnnnnnnnnnnnnnnnnnnnnnnnnnnnnnnnnnnnnnnnnnnnnnnnnnnnnnnnnnnnnnnnnnnnnnnnnnnnnnnnnnnnnnnnnnnnnnnnnnnnnnnnnnnnnnnnnnnnnnnnnnnnnnnnnnnnnnnnnnnnnnnnnnnnnnnnnnnnnnnnnnnnnnnnnnnnnnnnnnnnnnnnnnnnnnnnnnnnnnnnnnnnnnnnnnnnnnnnnnnnnnnnnnnnnnnnnnnnnnnnnnnnnnnnnnnnnnnnnnnnnnnnnnnnnnnnnnnnnnnnnnnnnnnnnnnnnnnnnnnnnnnnnnnnnnnnnnnnnnnnnnnnnnnnnnnnnnnnnnnnnnnnnnnnnnnnnnnnnnnnnnnnnnnnnnnnnnnnnnnnnnnnnnnnnnnnnnnnnnnnnnnnnnnnnnnnnnnnnnnnnnnnnnnnnnnnnnnnnnnnnnnnnnnnnnnnnnnnnnnnnnnnnnnnnnnnnnnnnnnnnnnnnnnnnnnnnnnnnnnnnnnnnnnnnnnnnnnnnnnnnnnnnnnnnnnnnnnnnnnnnnnnnnnnnnnnnnnnnnnnnnnnnnnnnnnnnnnnnnnnnnnnnnnnnnnnnnnnnnnnnnnnnnnnnnnnnnnnnnnnnnnnnnnnnnnnnnnnnnnnnnnnnnnnnnnnnnnnnnnnnnnnnnnnnnnnnnnnnnnnnnnnnnnnnnnnnnnnnnnnnnnnnnnnnnnnnnnnnnnnnnnnnnnnnnnnnnnnnnnnnnnnnnnnnnnnnnnnnnnnnnnnnnnnnnnnnnnnnnnnnnnnnnnnnnnnnnnnnnnnnnnnnnnnnnnnnnnnnnnnnnnnnnnnnnnnnnnnnnnnnnnnnnnnnnnnnnnnnnnnnnnnnnnnnnnnnnnnnnnnnnnnnnnnnnnnnnnnnnnnnnnnnnnnnnnnnnnnnnnnnnnnnnnnnnnnnnnnnnnnnnnnnnnnnnnnnnnnnnnnnnnnnnnnnnnnnnnnnnnnnnnnnnnnnnnnnnnnnnnnnnnnnnnnnnnnnnnnnnnnnnnnnnnnnnnnnnnnnnnnnnnnnnnnnnnnnnnnnnnnnnnnnnnnnnnnnnnnnnnnnnnnnnnnnnnnnnnnnnnnnnnnnnnnnnnnnnnnnnnnnnnnnnnnnnnnnnnnnnnnnnnnnnnnnnnnnnnnnnnnnnnnnnnnnnnnnnnnnnnnnnnnnnnnnnnnnnnnnnnnnnnnnnnnnnnnnnnnnnnnnnnnnnnnnnnnnnnnnnnnnnnnnnnnnnnnnnnnnnnnnnnnnnnnnnnnnnnnnnnnnnnnnnnnnnnnnnnnnnnnnnnnnnnnnnnnnnnnnnnnnnnnnnnnnnnnnnnnnnnnnnnnnnnnnnnnnnnnnnnnnnnnnnnnnnnnnnnnnnnnnnnnnnnnnnnnnnnnnnnnnnnnnnnnnnnnnnnnnnnnnnnnnnnnnnnnnnnnnnnnnnnnnnnnnnnnnnnnnnnnnnnnnnnnnnnnnnnnnnnnnnnnnnnnnnnnnnnnnnnnnnnnnnnnnnnnnnnnnnnnnnnnnnnnnnnnnnnnnnnnnnnnnnnnnnnnnnnnnnnnnnnnnnnnnnnnnnnnnnnnnnnnnnnnnnnnnnnnnnnnnnnnnnnnnnnnnnnnnnnnnnnnnnnnnnnnnnnnnnnnnnnnnnnnnnnnnnnnnnnnnnnnnnnnnnnnnnnnnnnnnnnnnnnnnnnnnnnnnnnnnnnnnnnnnnnnnnnnnnnnnnnnnnnnnnnnnnnnnnnnnnnnnnnnnnnnnnnnnnnnnnnnnnnnnnnnnnnnnnnnnnnnnnnnnnnnnnnnnnnnnnnnnnnnnnnnnnnnnnnnnnnnnnnnnnnnnnnnnnnnnnnnnnnnnnnnnnnnnnnnnnnnnnnnnnnnnnnnnnnnnnnnnnnnnnnnnnnnnnnnnnnnnnnnnnnnnnnnnnnnnnnnnnnnnnnnnnnnnnnnnnnnnnnnnnnnnnnnnnnnnnnnnnnnnnnnnnnnnnnnnnnnnnnnnnnnnnnnnnnnnnnnnnnnnnnnnnnnnnnnnnnnnnnnnnnnnnnnnnnnnnnnnnnnnnnnnnnnnnnnnnnnnnnnnnnnnnnnnnnnnnnnnnnnnnnnnnnnnnnnnnnnnnnnnnnnnnnnnnnnnnnnnnnnnnnnnnnnnnnnnnnnnnnnnnnnnnnnnnnnnnnnnnnnnnnnnnnnnnnnnnnnnnnnnnnnnnnnnnnnnnnnnnnnnnnnnnnnnnnnnnnnnnnnnnnnnnnnnnnnnnnnnnnnnnnnnnnnnnnnnnnnnnnnnnnnnnnnnnnnnnnnnnnnnnnnnnnnnnnnnnnnnnnnnnnnnnnnnnnnnnnnnnnnnnnnnnnnnnnnnnnnnnnnnnnnnnnnnnnnnnnnnnnnnnnnnnnnnnnnnnnnnnnnnnnnnnnnnnnnnnnnnnnnnnnnnnnnnnnnnnnnnnnnnnnnnnnnnnnnnnnnnnnnnnnnnnnnnnnnnnnnnnnnnnnnnnnnnnnnnnnnnnnnnnnnnnnnnnnnnnnnnnnnnnnnnnnnnnnnnnnnnnnnnnnnnnnnnnnnnnnnnnnnnnnnnnnnnnnnnnnnnnnnnnnnnnnnnnnnnnnnnnnnnnnnnnnnnnnnnnnnnnnnnnnnnnnnnnnnnnnnnnnnnnnnnnnnnnnnnnnnnnnnnnnnnnnnnnnnnnnnnnnnnnnnnnnnnnnnnnnnnnnnnnnnnnnnnnnnnnnnnnnnnnnnnnnnnnnnnnnnnnnnnnnnnnnnnnnnnnnnnnnnnnnnnnnnnnnnnnnnnnnnnnnnnnnnnnnnnnnnnnnnnnnnnnnnnnnnnnnnnnnnnnnnnnnnnnnnnnnnnnnnnnnnnnnnnnnnnnnnnnnnnnnnnnnnnnnnnnnnnnnnnnnnnnnnnnnnnnnnnnnnnnnnnnnnnnnnnnnnnnnnnnnnnnnnnnnnnnnnnnnnnnnnnnnnnnnnnnnnnnnnnnnnnnnnnnnnnnnnnnnnnnnnnnnnnnnnnnnnnnnnnnnnnnnnnnnnnnnnnnnnnnnnnnnnnnnnnnnnnnnnnnnnnnnnnnnnnnnnnnnnnnnnnnnnnnnnnnnnnnnnnnnnnnnnnnnnnnnnnnnnnnnnnnnnnnnnnnnnnnnnnnnnnnnnnnnnnnnnnnnnnnnnnnnnnnnnnnnnnnnnnnnnnnnnnnnnnnnnnnnnnnnnnnnnnnnnnnnnnnnnnnnnnnnnnnnnnnnnnnnnnnnnnnnnnnnnnnnnnnnnnnnnnnnnnnnnnnnnnnnnnnnnnnnnnnnnnnnnnnnnnnnnnnnnnnnnnnnnnnnnnnnnnnnnnnnnnnnnnnnnnnnnnnnnnnnnnnnnnnnnnnnnnnnnnnnnnnnnnnnnnnnnnnnnnnnnnnnnnnnnnnnnnnnnnnnnnnnnnnnnnnnnnnnnnnnnnnnnnnnnnnnnnnnnnnnnnnnnnnnnnnnnnnnnnnnnnnnnnnnnnnnnnnnnnnnnnnnnnnnnnnnnnnnnnnnnnnnnnnnnnnnnnnnnnnnnnnnnnnnnnnnnnnnnnnnnnnnnnnnnnnnnnnnnnnnnnnnnnnnnnnnnnnnnnnnnnnnnnnnnnnnnnnnnnnnnnnnnnnnnnnnnnnnnnnnnnnnnnnnnnnnnnnnnnnnnnnnnnnnnnnnnnnnnnnnnnnnnnnnnnnnnnnnnnnnnnnnnnnnnnnnnnnnnnnnnnnnnnnnnnnnnnnnnnnnnnnnnnnnnnnnnnnnnnnnnnnnnnnnnnnnnnnnnnnnnnnnnnnnnnnnnnnnnnnnnnnnnnnnnnnnnnnnnnnnnnnnnnnnnnnnnnnnnnnnnnnnnnnnnnnnnnnnnnnnnnnnnnnnnnnnnnnnnnnnnnnnnnnnnnnnnnnnnnnnnnnnnnnnnnnnnnnnnnnnnnnnnnnnnnnnnnnnnnnnnnnnnnnnnnnnnnnnnnnnnnnnnnnnnnnnnnnnnnnnnnnnnnnnnnnnnnnnnnnnnnnnnnnnnnnnnnnnnnnnnnnnnnnnnnnnnnnnnnnnnnnnnnnnnnnnnnnnnnnnnnnnnnnnnnnnnnnnnnnnnnnnnnnnnnnnnnnnnnnnnnnnnnnnnnnnnnnnnnnnnnnnnnnnnnnnnnnnnnnnnnnnnnnnnnnnnnnnnnnnnnnnnnnnnnnnnnnnnnnnnnnnnnnnnnnnnnnnnnnnnnnnnnnnnnnnnnnnnnnnnnnnnnnnnnnnnnnnnnnnnnnnnnnnnnnnnnnnnnnnnnnnnnnnnnnnnnnnnnnnnnnnnnnnnnnnnnnnnnnnnnnnnnnnnnnnnnnnnnnnnnnnnnnnnnnnnnnnnnnnnnnnnnnnnnnnnnnnnnnnnnnnnnnnnnnnnnnnnnnnnnnnnnnnnnnnnnnnnnnnnnnnnnnnnnnnnnnnnnnnnnnnnnnnnnnnnnnnnnnnnnnnnnnnnnnnnnnnnnnnnnnnnnnnnnnnnnnnnnnnnnnnnnnnnnnnnnnnnnnnnnnnnnnnnnnnnnnnnnnnnnnnnnnnnnnnnnnnnnnnnnnnnnnnnnnnnnnnnnnnnnnnnnnnnnnnnnnnnnnnnnnnnnnnnnnnnnnnnnnnnnnnnnnnnnnnnnnnnnnnnnnnnnnnnnnnnnnnnnnnnnnnnnnnnnnnnnnnnnnnnnnnnnnnnnnnnnnnnnnnnnnnnnnnnnnnnnnnnnnnnnnnnnnnnnnnnnnnnnnnnnnnnnnnnnnnnnnnnnnnnnnnnnnnnnnnnnnnnnnnnnnnnnnnnnnnnnnnnnnnnnnnnnnnnnnnnnnnnnnnnnnnnnnnnnnnnnnnnnnnnnnnnnnnnnnnnnnnnnnnnnnnnnnnnnnnnnnnnnnnnnnnnnnnnnnnnnnnnnnnnnnnnnnnnnnnnnnnnnnnnnnnnnnnnnnnnnnnnnnnnnnnnnnnnnnnnnnnnnnnnnnnnnnnnnnnnnnnnnnnnnnnnnnnnnnnnnnnnnnnnnnnnnnnnnnnnnnnnnnnnnnnnnnnnnnnnnnnnnnnnnnnnnnnnnnnnnnnnnnnnnnnnnnnnnnnnnnnnnnnnnnnnnnnnnnnnnnnnnnnnnnnnnnnnnnnnnnnnnnnnnnnnnnnnnnnnnnnnnnnnnnnnnnnnnnnnnnnnnnnnnnnnnnnnnnnnnnnnnnnnnnnnnnnnnnnnnnnnnnnnnnnnnnnnnnnnnnnnnnnnnnnnnnnnnnnnnnnnnnnnnnnnnnnnnnnnnnnnnnnnnnnnnnnnnnnnnnnnnnnnnnnnnnnnnnnnnnnnnnnnnnnnnnnnnnnnnnnnnnnnnnnnnnnnnnnnnnnnnnnnnnnnnnnnnnnnnnnnnnnnnnnnnnnnnnnnnnnnnnnnnnnnnnnnnnnnnnnnnnnnnnnnnnnnnnnnnnnnnnnnnnnnnnnnnnnnnnnnnnnnnnnnnnnnnnnnnnnnnnnnnnnnnnnnnnnnnnnnnnnnnnnnnnnnnnnnnnnnnnnnnnnnnnnnnnnnnnnnnnnnnnnnnnnnnnnnnnnnnnnnnnnnnnnnnnnnnnnnnnnnnnnnnnnnnnnnnnnnnnnnnnnnnnnnnnnnnnnnnnnnnnnnnnnnnnnnnnnnnnnnnnnnnnnnnnnnnnnnnnnnnnnnnnnnnnnnnnnnnnnnnnnnnnnnnnnnnnnnnnnnnnnnnnnnnnnnnnnnnnnnnnnnnnnnnnnnnnnnnnnnnnnnnnnnnnnnnnnnnnnnnnnnnnnnnnnnnnnnnnnnnnnnnnnnnnnnnnnnnnnnnnnnnnnnnnnnnnnnnnnnnnnnnnnnnnnnnnnnnnnnnnnnnnnnnnnnnnnnnnnnnnnnnnnnnnnnnnnnnnnnnnnnnnnnnnnnnnnnnnnnnnnnnnnnnnnnnnnnnnnnnnnnnnnnnnnnnnnnnnnnnnnnnnnnnnnnnnnnnnnnnnnnnnnnnnnnnnnnnnnnnnnnnnnnnnnnnnnnnnnnnnnnnnnnnnnnnnnnnnnnnnnnnnnnnnnnnnnnnnnnnnnnnnnnnnnnnnnnnnnnnnnnnnnnnnnnnnnnnnnnnnnnnnnnnnnnnnnnnnnnnnnnnnnnnnnnnnnnnnnnnnnnnnnnnnnnnnnnnnnnnnnnnnnnnnnnnnnnnnnnnnnnnnnnnnnnnnnnnnnnnnnnnnnnnnnnnnnnnnnnnnnnnnnnnnnnnnnnnnnnnnnnnnnnnnnnnnnnnnnnnnnnnnnnnnnnnnnnnnnnnnnnnnnnnnnnnnnnnnnnnnnnnnnnnnnnnnnnnnnnnnnnnnnnnnnnnnnnnnnnnnnnnnnnnnnnnnnnnnnnnnnnnnnnnnnnnnnnnnnnnnnnnnnnnnnnnnnnnnnnnnnnnnnnnnnnnnnnnnnnnnnnnnnnnnnnnnnnnnnnnnnnnnnnnnnnnnnnnnnnnnnnnnnnnnnnnnnnnnnnnnnnnnnnnnnnnnnnnnnnnnnnnnnnnnnnnnnnnnnnnnnnnnnnnnnnnnnnnnnnnnnnnnnnnnnnnnnnnnnnnnnnnnnnnnnnnnnnnnnnnnnnnnnnnnnnnnnnnnnnnnnnnnnnnnnnnnnnnnnnnnnnnnnnnnnnnnnnnnnnnnnnnnnnnnnnnnnnnnnnnnnnnnnnnnnnnnnnnnnnnnnnnnnnnnnnnnnnnnnnnnnnnnnnnnnnnnnnnnnnnnnnnnnnnnnnnnnnnnnnnnnnnnnnnnnnnnnnnnnnnnnnnnnnnnnnnnnnnnnnnnnnnnnnnnnnnnnnnnnnnnnnnnnnnnnnnnnnnnnnnnnnnnnnnnnnnnnnnnnnnnnnnnnnnnnnnnnnnnnnnnnnnnnnnnnnnnnnnnnnnnnnnnnnnnnnnnnnnnnnnnnnnnnnnnnnnnnnnnnnnnnnnnnnnnnnnnnnnnnnnnnnnnnnnnnnnnnnnnnnnnnnnnnnnnnnnnnnnnnnnnnnnnnnnnnnnnnnnnnnnnnnnnnnnnnnnnnnnnnnnnnnnnnnnnnnnnnnnnnnnnnnnnnnnnnnnnnnnnnnnnnnnnnnnnnnnnnnnnnnnnnnnnnnnnnnnnnnnnnnnnnnnnnnnnnnnnnnnnnnnnnnnnnnnnnnnnnnnnnnnnnnnnnnnnnnnnnnnnnnnnnnnnnnnnnnnnnnnnnnnnnnnnnnnnnnnnnnnnnnnnnnnnnnnnnnnnnnnnnnnnnnnnnnnnnnnnnnnnnnnnnnnnnnnnnnnnnnnnnnnnnnnnnnnnnnnnnnnnnnnnnnnnnnnnnnnnnnnnnnnnnnnnnnnnnnnnnnnnnnnnnnnnnnnnnnnnnnnnnnnnnnnnnnnnnnnnnnnnnnnnnnnnnnnnnnnnnnnnnnnnnnnnnnnnnnnnnnnnnnnnnnnnnnnnnnnnnnnnnnnnnnnnnnnnnnnnnnnnnnnnnnnnnnnnnnnnnnnnnnnnnnnnnnnnnnnnnnnnnnnnnnnnnnnnnnnnnnnnnnnnnnnnnnnnnnnnnnnnnnnnnnnnnnnnnnnnnnnnnnnnnnnnnnnnnnnnnnnnnnnnnnnnnnnnnnnnnnnnnnnnnnnnnnnnnnnnnnnnnnnnnnnnnnnnnnnnnnnnnnnnnnnnnnnnnnnnnnnnnnnnnnnnnnnnnnnnnnnnnnnnnnnnnnnnnnnnnnnnnnnnnnnnnnnnnnnnnnnnnnnnnnnnnnnnnnnnnnnnnnnnnnnnnnnnnnnnnnnnnnnnnnnnnnnnnnnnnnnnnnnnnnnnnnnnnnnnnnnnnnnnnnnnnnnnnnnnnnnnnnnnnnnnnnnnnnnnnnnnnnnnnnnnnnnnnnnnnnnnnnnnnnnnnnnnnnnnnnnnnnnnnnnnnnnnnnnnnnnnnnnnnnnnnnnnnnnnnnnnnnnnnnnnnnnnnnnnnnnnnnnnnnnnnnnnnnnnnnnnnnnnnnnnnnnnnnnnnnnnnnnnnnnnnnnnnnnnnnnnnnnnnnnnnnnnnnnnnnnnnnnnnnnnnnnnnnnnnnnnnnnnnnnnnnnnnnnnnnnnnnnnnnnnnnnnnnnnnnnnnnnnnnnnnnnnnnnnnnnnnnnnnnnnnnnnnnnnnnnnnnnnnnnnnnnnnnnnnnnnnnnnnnnnnnnnnnnnnnnnnnnnnnnnnnnnnnnnnnnnnnnnnnnnnnnnnnnnnnnnnnnnnnnnnnnnnnnnnnnnnnnnnnnnnnnnnnnnnnnnnnnnnnnnnnnnnnnnnnnnnnnnnnnnnnnnnnnnnnnnnnnnnnnnnnnnnnnnnnnnnnnnnnnnnnnnnnnnnnnnnnnnnnnnnnnnnnnnnnnnnnnnnnnnnnnnnnnnnnnnnnnnnnnnnnnnnnnnnnnnnnnnnnnnnnnnnnnnnnnnnnnnnnnnnnnnnnnnnnnnnnnnnnnnnnnnnnnnnnnnnnnnnnnnnnnnnnnnnnnnnnnnnnnnnnnnnnnnnnnnnnnnnnnnnnnnnnnnnnnnnnnnnnnnnnnnnnnnnnnnnnnnnnnnnnnnnnnnnnnnnnnnnnnnnnnnnnnnnnnnnnnnnnnnnnnnnnnnnnnnnnnnnnnnnnnnnnnnnnnnnnnnnnnnnnnnnnnnnnnnnnnnnnnnnnnnnnnnnnnnnnnnnnnnnnnnnnnnnnnnnnnnnnnnnnnnnnnnnnnnnnnnnnnnnnnnnnnnnnnnnnnnnnnnnnnnnnnnnnnnnnnnnnnnnnnnnnnnnnnnnnnnnnnnnnnnnnnnnnnnnnnnnnnnnnnnnnnnnnnnnnnnnnnnnnnnnnnnnnnnnnnnnnnnnnnnnnnnnnnnnnnnnnnnnnnnnnnnnnnnnnnnnnnnnnnnnnnnnnnnnnnnnnnnnnnnnnnnnnnnnnnnnnnnnnnnnnnnnnnnnnnnnnnnnnnnnnnnnnnnnnnnnnnnnnnnnnnnnnnnnnnnnnnnnnnnnnnnnnnnnnnnnnnnnnnnnnnnnnnnnnnnnnnnnnnnnnnnnnnnnnnnnnnnnnnnnnnnnnnnnnnnnnnnnnnnnnnnnnnnnnnnnnnnnnnnnnnnnnnnnnnnnnnnnnnnnnnnnnnnnnnnnnnnnnnnnnnnnnnnnnnnnnnnnnnnnnnnnnnnnnnnnnnnnnnnnnnnnnnnnnnnnnnnnnnnnnnnnnnnnnnnnnnnnnnnnnnnnnnnnnnnnnnnnnnnnnnnnnnnnnnnnnnnnnnnnnnnnnnnnnnnnnnnnnnnnnnnnnnnnnnnnnnnnnnnnnnnnnnnnnnnnnnnnnnnnnnnnnnnnnnnnnnnnnnnnnnnnnnnnnnnnnnnnnnnnnnnnnnnnnnnnnnnnnnnnnnnnnnnnnnnnnnnnnnnnnnnnnnnnnnnnnnnnnnnnnnnnnnnnnnnnnnnnnnnnnnnnnnnnnnnnnnnnnnnnnnnnnnnnnnnnnnnnnnnnnnnnnnnnnnnnnnnnnnnnnnnnnnnnnnnnnnnnnnnnnnnnnnnnnnnnnnnnnnnnnnnnnnnnnnnnnnnnnnnnnnnnnnnnnnnnnnnnnnnnnnnnnnnnnnnnnnnnnnnnnnnnnnnnnnnnnnnnnnnnnnnnnnnnnnnnnnnnnnnnnnnnnnnnnnnnnnnnnnnnnnnnnnnnnnnnnnnnnnnnnnnnnnnnnnnnnnnnnnnnnnnnnnnnnnnnnnnnnnnnnnnnnnnnnnnnnnnnnnnnnnnnnnnnnnnnnnnnnnnnnnnnnnnnnnnnnnnnnnnnnnnnnnnnnnnnnnnnnnnnnnnnnnnnnnnnnnnnnnnnnnnnnnnnnnnnnnnnnnnnnnnnnnnnnnnnnnnnnnnnnnnnnnnnnnnnnnnnnnnnnnnnnnnnnnnnnnnnnnnnnnnnnnnnnnnnnnnnnnnnnnnnnnnnnnnnnnnnnnnnnnnnnnnnnnnnnnnnnnnnnnnnnnnnnnnnnnnnnnnnnnnnnnnnnnnnnnnnnnnnnnnnnnnnnnnnnnnnnnnnnnnnnnnnnnnnnnnnnnnnnnnnnnnnnnnnnnnnnnnnnnnnnnnnnnnnnnnnnnnnnnnnnnnnnnnnnnnnnnnnnnnnnnnnnnnnnnnnnnnnnnnnnnnnnnnnnnnnnnnnnnnnnnnnnnnnnnnnnnnnnnnnnnnnnnnnnnnnnnnnnnnnnnnnnnnnnnnnnnnnnnnnnnnnnnnnnnnnnnnnnnnnnnnnnnnnnnnnnnnnnnnnnnnnnnnnnnnnnnnnnnnnnnnnnnnnnnnnnnnnnnnnnnnnnnnnnnnnnnnnnnnnnnnnnnnnnnnnnnnnnnnnnnnnnnnnnnnnnnnnnnnnnnnnnnnnnnnnnnnnnnnnnnnnnnnnnnnnnnnnnnnnnnnnnnnnnnnnnnnnnnnnnnnnnnnnnnnnnnnnnnnnnnnnnnnnnnnnnnnnnnnnnnnnnnnnnnnnnnnnnnnnnnnnnnnnnnnnnnnnnnnnnnnnnnnnnnnnnnnnnnnnnnnnnnnnnnnnnnnnnnnnnnnnnnnnnnnnnnnnnnnnnnnnnnnnnnnnnnnnnnnnnnnnnnnnnnnnnnnnnnnnnnnnnnnnnnnnnnnnnnnnnnnnnnnnnnnnnnnnnnnnnnnnnnnnnnnnnnnnnnnnnnnnnnnnnnnnnnnnnnnnnnnnnnnnnnnnnnnnnnnnnnnnnnnnnnnnnnnnnnnnnnnnnnnnnnnnnnnnnnnnnnnnnnnnnnnnnnnnnnnnnnnnnnnnnnnnnnnnnnnnnnnnnnnnnnnnnnnnnnnnnnnnnnnnnnnnnnnnnnnnnnnnnnnnnnnnnnnnnnnnnnnnnnnnnnnnnnnnnnnnnnnnnnnnnnnnnnnnnnnnnnnnnnnnnnnnnnnnnnnnnnnnnnnnnnnnnnnnnnnnnnnnnnnnnnnnnnnnnnnnnnnnnnnnnnnnnnnnnnnnnnnnnnnnnnnnnnnnnnnnnnnnnnnnnnnnnnnnnnnnnnnnnnnnnnnnnnnnnnnnnnnnnnnnnnnnnnnnnnnnnnnnnnnnnnnnnnnnnnnnnnnnnnnnnnnnnnnnnnnnnnnnnnnnnnnnnnnnnnnnnnnnnnnnnnnnnnnnnnnnnnnnnnnnnnnnnnnnnnnnnnnnnnnnnnnnnnnnnnnnnnnnnnnnnnnnnnnnnnnnnnnnnnnnnnnnnnnnnnnnnnnnnnnnnnnnnnnnnnnnnnnnnnnnnnnnnnnnnnnnnnnnnnnnnnnnnnnnnnnnnnnnnnnnnnnnnnnnnnnnnnnnnnnnnnnnnnnnnnnnnnnnnnnnnnnnnnnnnnnnnnnnnnnnnnnnnnnnnnnnnnnnnnnnnnnnnnnnnnnnnnnnnnnnnnnnnnnnnnnnnnnnnnnnnnnnnnnnnnnnnnnnnnnnnnnnnnnnnnnnnnnnnnnnnnnnnnnnnnnnnnnnnnnnnnnnnnnnnnnnnnnnnnnnnnnnnnnnnnnnnnnnnnnnnnnnnnnnnnnnnnnnnnnnnnnnnnnnnnnnnnnnnnnnnnnnnnnnnnnnnnnnnnnnnnnnnnnnnnnnnnnnnnnnnnnnnnnnnnnnnnnnnnnnnnnnnnnnnnnnnnnnnnnnnnnnnnnnnnnnnnnnnnnnnnnnnnnnnnnnnnnnnnnnnnnnnnnnnnnnnnnnnnnnnnnnnnnnnnnnnnnnnnnnnnnnnnnnnnnnnnnnnnnnnnnnnnnnnnnnnnnnnnnnnnnnnnnnnnnnnnnnnnnnnnnnnnnnnnnnnnnnnnnnnnnnnnnnnnnnnnnnnnnnnnnnnnnnnnnnnnnnnnnnnnnnnnnnnnnnnnnnnnnnnnnnnnnnnnnnnnnnnnnnnnnnnnnnnnnnnnnnnnnnnnnnnnnnnnnnnnnnnnnnnnnnnnnnnnnnnnnnnnnnnnnnnnnnnnnnnnnnnnnnnnnnnnnnnnnnnnnnnnnnnnnnnnnnnnnnnnnnnnnnnnnnnnnnnnnnnnnnnnnnnnnnnnnnnnnnnnnnnnnnnnnnnnnnnnnnnnnnnnnnnnnnnnnnnnnnnnnnnnnnnnnnnnnnnnnnnnnnnnnnnnnnnnnnnnnnnnnnnnnnnnnnnnnnnnnnnnnnnnnnnnnnnnnnnnnnnnnnnnnnnnnnnnnnnnnnnnnnnnnnnnnnnnnnnnnnnnnnnnnnnnnnnnnnnnnnnnnnnnnnnnnnnnnnnnnnnnnnnnnnnnnnnnnnnnnnnnnnnnnnnnnnnnnnnnnnnnnnnnnnnnnnnnnnnnnnnnnnnnnnnnnnnnnnnnnnnnnnnnnnnnnnnnnnnnnnnnnnnnnnnnnnnnnnnnnnnnnnnnnnnnnnnnnnnnnnnnnnnnnnnnnnnnnnnnnnnnnnnnnnnnnnnnnnnnnnnnnnnnnnnnnnnnnnnnnnnnnnnnnnnnnnnnnnnnnnnnnnnnnnnnnnnnnnnnnnnnnnnnnnnnnnnnnnnnnnnnnnnnnnnnnnnnnnnnnnnnnnnnnnnnnnnnnnnnnnnnnnnnnnnnnnnnnnnnnnnnnnnnnnnnnnnnnnnnnnnnnnnnnnnnnnnnnnnnnnnnnnnnnnnnnnnnnnnnnnnnnnnnnnnnnnnnnnnnnnnnnnnnnnnnnnnnnnnnnnnnnnnnnnnnnnnnnnnnnnnnnnnnnnnnnnnnnnnnnnnnnnnnnnnnnnnnnnnnnnnnnnnnnnnnnnnnnnnnnnnnnnnnnnnnnnnnnnnnnnnnnnnnnnnnnnnnnnnnnnnnnnnnnnnnnnnnnnnnnnnnnnnnnnnnnnnnnnnnnnnnnnnnnnnnnnnnnnnnnnnnnnnnnnnnnnnnnnnnnnnnnnnnnnnnnnnnnnnnnnnnnnnnnnnnnnnnnnnnnnnnnnnnnnnnnnnnnnnnnnnnnnnnnnnnnnnnnnnnnnnnnnnnnnnnnnnnnnnnnnnnnnnnnnnnnnnnnnnnnnnnnnnnnnnnnnnnnnnnnnnnnnnnnnnnnnnnnnnnnnnnnnnnnnnnnnnnnnnnnnnnnnnnnnnnnnnnnnnnnnnnnnnnnnnnnnnnnnnnnnnnnnnnnnnnnnnnnnnnnnnnnnnnnnnnnnnnnnnnnnnnnnnnnnnnnnnnnnnnnnnnnnnnnnnnnnnnnnnnnnnnnnnnnnnnnnnnnnnnnnnnnnnnnnnnnnnnnnnnnnnnnnnnnnnnnnnnnnnnnnnnnnnnnnnnnnnnnnnnnnnnnnnnnnnnnnnnnnnnnnnnnnnnnnnnnnnnnnnnnnnnnnnnnnnnnnnnnnnnnnnnnnnnnnnnnnnnnnnnnnnnnnnnnnnnnnnnnnnnnnnnnnnnnnnnnnnnnnnnnnnnnnnnnnnnnnnnnnnnnnnnnnnnnnnnnnnnnnnnnnnnnnnnnnnnnnnnnnnnnnnnnnnnnnnnnnnnnnnnnnnnnnnnnnnnnnnnnnnnnnnnnnnnnnnnnnnnnnnnnnnnnnnnnnnnnnnnnnnnnnnnnnnnnnnnnnnnnnnnnnnnnnnnnnnnnnnnnnnnnnnnnnnnnnnnnnnnnnnnnnnnnnnnnnnnnnnnnnnnnnnnnnnnnnnnnnnnnnnnnnnnnnnnnnnnnnnnnnnnnnnnnnnnnnnnnnnnnnnnnnnnnnnnnnnnnnnnnnnnnnnnnnnnnnnnnnnnnnnnnnnnnnnnnnnnnnnnnnnnnnnnnnnnnnnnnnnnnnnnnnnnnnnnnnnnnnnnnnnnnnnnnnnnnnnnnnnnnnnnnnnnnnnnnnnnnnnnnnnnnnnnnnnnnnnnnnnnnnnnnnnnnnnnnnnnnnnnnnnnnnnnnnnnnnnnnnnnnnnnnnnnnnnnnnnnnnnnnnnnnnnnnnnnnnnnnnnnnnnnnnnnnnnnnnnnnnnnnnnnnnnnnnnnnnnnnnnnnnnnnnnnnnnnnnnnnnnnnnnnnnnnnnnnnnnnnnnnnnnnnnnnnnnnnnnnnnnnnnnnnnnnnnnnnnnnnnnnnnnnnnnnnnnnnnnnnnnnnnnnnnnnnnnnnnnnnnnnnnnnnnnnnnnnnnnnnnnnnnnnnnnnnnnnnnnnnnnnnnnnnnnnnnnnnnnnnnnnnnnnnnnnnnnnnnnnnnnnnnnnnnnnnnnnnnnnnnnnnnnnnnnnnnnnnnnnnnnnnnnnnnnnnnnnnnnnnnnnnnnnnnnnnnnnnnnnnnnnnnnnnnnnnnnnnnnnnnnnnnnnnnnnnnnnnnnnnnnnnnnnnnnnnnnnnnnnnnnnnnnnnnnnnnnnnnnnnnnnnnnnnnnnnnnnnnnnnnnnnnnnnnnnnnnnnnnnnnnnnnnnnnnnnnnnnnnnnnnnnnnnnnnnnnnnnnnnnnnnnnnnnnnnnnnnnnnnnnnnnnnnnnnnnnnnnnnnnnnnnnnnnnnnnnnnnnnnnnnnnnnnnnnnnnnnnnnnnnnnnnnnnnnnnnnnnnnnnnnnnnnnnnnnnnnnnnnnnnnnnnnnnnnnnnnnnnnnnnnnnnnnnnnnnnnnnnnnnnnnnnnnnnnnnnnnnnnnnnnnnnnnnnnnnnnnnnnnnnnnnnnnnnnnnnnnnnnnnnnnnnnnnnnnnnnnnnnnnnnnnnnnnnnnnnnnnnnnnnnnnnnnnnnnnnnnnnnnnnnnnnnnnnnnnnnnnnnnnnnnnnnnnnnnnnnnnnnnnnnnnnnnnnnnnnnnnnnnnnnnnnnnnnnnnnnnnnnnnnnnnnnnnnnnnnnnnnnnnnnnnnnnnnnnnnnnnnnnnnnnnnnnnnnnnnnnnnnnnnnnnnnnnnnnnnnnnnnnnnnnnnnnnnnnnnnnnnnnnnnnnnnnnnnnnnnnnnnnnnnnnnnnnnnnnnnnnnnnnnnnnnnnnnnnnnnnnnnnnnnnnnnnnnnnnnnnnnnnnnnnnnnnnnnnnnnnnnnnnnnnnnnnnnnnnnnnnnnnnnnnnnnnnnnnnnnnnnnnnnnnnnnnnnnnnnnnnnnnnnnnnnnnnnnnnnnnnnnnnnnnnnnnnnnnnnnnnnnnnnnnnnnnnnnnnnnnnnnnnnnnnnnnnnnnnnnnnnnnnnnnnnnnnnnnnnnnnnnnnnnnnnnnnnnnnnnnnnnnnnnnnnnnnnnnnnnnnnnnnnnnnnnnnnnnnnnnnnnnnnnnnnnnnnnnnnnnnnnnnnnnnnnnnnnnnnnnnnnnnnnnnnnnnnnnnnnnnnnnnnnnnnnnnnnnnnnnnnnnnnnnnnnnnnnnnnnnnnnnnnnnnnnnnnnnnnnnnnnnnnnnnnnnnnnnnnnnnnnnnnnnnnnnnnnnnnnnnnnnnnnnnnnnnnnnnnnnnnnnnnnnnnnnnnnnnnnnnnnnnnnnnnnnnnnnnnnnnnnnnnnnnnnnnnnnnnnnnnnnnnnnnnnnnnnnnnnnnnnnnnnnnnnnnnnnnnnnnnnnnnnnnnnnnnnnnnnnnnnnnnnnnnnnnnnnnnnnnnnnnnnnnnnnnnnnnnnnnnnnnnnnnnnnnnnnnnnnnnnnnnnnnnnnnnnnnnnnnnnnnnnnnnnnnnnnnnnnnnnnnnnnnnnnnnnnnnnnnnnnnnnnnnnnnnnnnnnnnnnnnnnnnnnnnnnnnnnnnnnnnnnnnnnnnnnnnnnnnnnnnnnnnnnnnnnnnnnnnnnnnnnnnnnnnnnnnnnnnnnnnnnnnnnnnnnnnnnnnnnnnnnnnnnnnnnnnnnnnnnnnnnnnnnnnnnnnnnnnnnnnnnnnnnnnnnnnnnnnnnnnnnnnnnnnnnnnnnnnnnnnnnnnnnnnnnnnnnnnnnnnnnnnnnnnnnnnnnnnnnnnnnnnnnnnnnnnnnnnnnnnnnnnnnnnnnnnnnnnnnnnnnnnnnnnnnnnnnnnnnnnnnnnnnnnnnnnnnnnnnnnnnnnnnnnnnnnnnnnnnnnnnnnnnnnnnnnnnnnnnnnnnnnnnnnnnnnnnnnnnnnnnnnnnnnnnnnnnnnnnnnnnnnnnnnnnnnnnnnnnnnnnnnnnnnnnnnnnnnnnnnnnnnnnnnnnnnnnnnnnnnnnnnnnnnnnnnnnnnnnnnnnnnnnnnnnnnnnnnnnnnnnnnnnnnnnnnnnnnnnnnnnnnnnnnnnnnnnnnnnnnnnnnnnnnnnnnnnnnnnnnnnnnnnnnnnnnnnnnnnnnnnnnnnnnnnnnnnnnnnnnnnnnnnnnnnnnnnnnnnnnnnnnnnnnnnnnnnnnnnnnnnnnnnnnnnnnnnnnnnnnnnnnnnnnnnnnnnnnnnnnnnnnnnnnnnnnnnnnnnnnnnnnnnnnnnnnnnnnnnnnnnnnnnnnnnnnnnnnnnnnnnnnnnnnnnnnnnnnnnnnnnnnnnnnnnnnnnnnnnnnnnnnnnnnnnnnnnnnnnnnnnnnnnnnnnnnnnnnnnnnnnnnnnnnnnnnnnnnnnnnnnnnnnnnnnnnnnnnnnnnnnnnnnnnnnnnnnnnnnnnnnnnnnnnnnnnnnnnnnnnnnnnnnnnnnnnnnnnnnnnnnnnnnnnnnnnnnnnnnnnnnnnnnnnnnnnnnnnnnnnnnnnnnnnnnnnnnnnnnnnnnnnnnnnnnnnnnnnnnnnnnnnnnnnnnnnnnnnnnnnnnnnnnnnnnnnnnnnnnnnnnnnnnnnnnnnnnnnnnnnnnnnnnnnnnnnnnnnnnnnnnnnnnnnnnnnnnnnnnnnnnnnnnnnnnnnnnnnnnnnnnnnnnnnnnnnnnnnnnnnnnnnnnnnnnnnnnnnnnnnnnnnnnnnnnnnnnnnnnnnnnnnnnnnnnnnnnnnnnnnnnnnnnnnnnnnnnnnnnnnnnnnnnnnnnnnnnnnnnnnnnnnnnnnnnnnnnnnnnnnnnnnnnnnnnnnnnnnnnnnnnnnnnnnnnnnnnnnnnnnnnnnnnnnnnnnnnnnnnnnnnnnnnnnnnnnnnnnnnnnnnnnnnnnnnnnnnnnnnnnnnnnnnnnnnnnnnnnnnnnnnnnnnnnnnnnnnnnnnnnnnnnnnnnnnnnnnnnnnnnnnnnnnnnnnnnnnnnnnnnnnnnnnnnnnnnnnnnnnnnnnnnnnnnnnnnnnnnnnnnnnnnnnnnnnnnnnnnnnnnnnnnnnnnnnnnnnnnnnnnnnnnnnnnnnnnnnnnnnnnnnnnnnnnnnnnnnnnnnnnnnnnnnnnnnnnnnnnnnnnnnnnnnnnnnnnnnnnnnnnnnnnnnnnnnnnnnnnnnnnnnnnnnnnnnnnnnnnnnnnnnnnnnnnnnnnnnnnnnnnnnnnnnnnnnnnnnnnnnnnnnnnnnnnnnnnnnnnnnnnnnnnnnnnnnnnnnnnnnnnnnnnnnnnnnnnnnnnnnnnnnnnnnnnnnnnnnnnnnnnnnnnnnnnnnnnnnnnnnnnnnnnnnnnnnnnnnnnnnnnnnnnnnnnnnnnnnnnnnnnnnnnnnnnnnnnnnnnnnnnnnnnnnnnnnnnnnnnnnnnnnnnnnnnnnnnnnnnnnnnnnnnnnnnnnnnnnnnnnnnnnnnnnnnnnnnnnnnnnnnnnnnnnnnnnnnnnnnnnnnnnnnnnnnnnnnnnnnnnnnnnnnnnnnnnnnnnnnnnnnnnnaggtatatctatatatatctatattaaagtatataattaccttaattattctttagtttttaataatactatttaatattctagttaagattaggatatataggagattaaaggttattataaaagctttatttactatagtataatataaataccctaaattaactaatatctttaagaattaaattctatttattaataaattaatatagaagggtttattttcttattttaataatttattagccccttttaattcctatctatatctttagataggaattactttttttctaagtctctattaatactctttagattagattaattactttcttccttaaatagttctatctaggtttctattcttataatatatattctttctctttacttataatagtatatagggccttttttaataatagctactattacctagagatattaatataagtttattatatattttagtctttttactaagaaaagagggtaggaatatatactatatctattatatctatagtaatagtatctcctttcctagtatttatattctaattctttttctttaatctattttacttattttctaataaggtcttagtcctcttttctaatttataagaaagtaattataactataaggattagtaactattctatataattatctataaaggactagagatatattactttcctttcttagtaatttaaggtttactttatctctaataatagtaagtctatattagtattaatttaatatagtagtaggattaacttaattagattattaaagagattttagtaagaaaagactatatagataattaggtttagtaatctaattaaaaggaatacttttatatcttctagttaatctattacttttaaattagtaaattcttttttaaaggtaaataggaatatagtaaaagactactttagtccttactatatttttctaagatactaagtagctcttttcttaatatttagatctttataaatatcttctagatattaaaggaattcttttataattttatttacctattagtattatataaatataatagtatttttatttatatttccttctagctataagtaggtataaagtatatatacctagttatctctaagggtatcttagttaattactaatttatttttaattaataatttaaatataggctattctattctaactcctttaaaggttaagggattagagagatataactatagttatatagtttatcttatttctaataacccttaggtaggcttatttttagtcttattattcttattagattcttcttatactattatatttatttagactagctctttaagcttcttaatcctttcctcttatacttatataatctcttcctaggaggtagtagattagactaattactatattattactttagcctatttaggtagttctaattattctatattctcgtttattatactatttatcggtatatccttctatactcttctgatcttctatagaaaaggaagcttttagaatataaagggatagagctagattagaatttaagctaactaagccgtttactattatctaaaagcttaaggaaaggaaataaagcttataggaagaaacgggagaaaataggggtagtaaaggtcatatacttattatataatcctatataggctctggcccattatataggggtagaatatagtcgataactagtatttaactataaagagaaagtagaaggttaactagaattagctaataaaaaggctacccctattacttactaggttcttnnnnnnnnnnnnnnnnnnnnnnnnnnnnnnnnnnnnnnnnnnnnnnnnnnnnnnnnnnnnnnnnnnnnnnnnnnnnnnnnnnnnnnnnnnnnnnnnnnnnnnnnnnnnnnnnnnnnnnnnnnnnnnnnnnnnnnnnnnnnnnnnnnnnnnnnnnnnnnnnnnnnnnnnnnnnnnnnnnnnnnnnnnnnnnnnnnnnnnnnnnnnnnnnnnnnnnnnnnnnnnnnnnnnnnnnnnnnnnnnnnnnnnnnnnnnnnnnnnnnnnnnnnnnnnnnnnnnnnnnnnnnnnnnnnnnnnnnnnnnnnnnnnnnnnnnnnnnnnnnnnnnnnnnnnnnnnnnnnnnnnnnnnnnnnnnnnnnnnnnnnnnnnnnnnnnnnnnnnnnnnnnnnnnnnnnnnnnnnnnnnnnnnnnnatgtatatatagtagaaaaatcctaatcaattctctaactctttaaaaataataatagtctagaaaatataataatctaatagataacttagtaatcaaataaataaaataaaatgaaaggatattttttaggtaaaaaactgtaggactggtttttcgggcagaaaaccatctgagttggtttttctatagaaaaccagcctagtcagtcacgtgacccaactgtatcagggatgaaaaatgacagtattcatcctagattctgacacttcttaattaggatttaatactaaattaggggggtagtagtacataggtaagtataaggaacgtcgaattcttatactaatagcgcaatttttggtttttttttctagaattccaggtagtaatagtaattactaaataagcctccgaatcttaggtttttttaggtatattggtaggtaaaaaattggtatagaaaatagtgactatttaaaatttttgttttataagagttttcacctagctgtagtaacttggcgagaaccgggtagtagcaaaagtacgtatataccgccattacacgctagtgttttttttaaaaaaaagccaaaaattgagtgagcaaaaacatttgcaatggacctggttcgttccattaaagatctaaaatggctgtatattgaaatattaaatacattatcacattactaccccgaggataataagtatcatgacacactcactggccaacatccaggaccgaagactgtagagaaatatccgaatagggatttgaagaggcaagcataatatgcacaaaaaaaggtaaacatacaaattgcttactgagccttcgaagcctttgccttgttttcccttcggcgcttcagcgcatctggggtgtactcggtgtcaaggacataatcccaccaccggaagctgctggaatagttgccgatgaacttctcatggtggagatcgtggtgatcggcaccagcccagaagggaaggaaatggtgaagactccatgggaattcataaccactgtgagcatcaatggcctggaacaagcgcaagacgatccagatgtacatggtcagaatgtgcagttcacctgtcatcgcacaccaaacgatcgggcacccgatagtcccgaagcccaggatcatcacttcaatcggtgaggcatattcagcagccaagccgaaaggcgccgagtactggtggtggattttgtgaatagccttatagaggggtccccaatgaagtgcacggtgggagaagtaatgccaggtatcctccatcacaaagaagattgcaatttgatatgccatagtccaaagggtaggaaatgggatcgaagttgaaagtccacaaaattgtgccaaggggtggaagagcctagcatttgttagatccttagaaatccctggatttggaaagagattcgagtcttaccagatctggggtagttcgacagtgaaatgactcaagagcacgaacttggcgcaatcccattgttcccgtagcgatggaatcttgttctgcatagtattagaggtgaaccagatgaggtttgaaaaaaaaaaaaaaaaagaaattctacttacaccttgaatcttgtagcggttgaacatggcgaatgtgtcgatgaaaatccagggtagtgagcgaccgaagtagaccagttcatgcatgacgaatgacatgattccagtggccaggacatcgttctgcatccaagcataccaggctgcccacaacctctctgccacattcaggttggcattgtatttgccaatctcttcgaactggccccagtatgtccccgaggacaagactgttgaattcctatatgggatgttagatactatgacaggtcgaggatgtgagcatcctacattgcaaaggttgttctctttttcagaaagtaaagagaagcccgaagtcagaaggcagaagtcagaaggcagaaggcaggaggcagaagtcagaggccagcagtcagaaagaataaaggggaaggtagacgtgaaaccaaagccagagcgtgattctatgtaaggttataaagaaaaaaagggataatcaagaagatcaaggacagtccaatcccgacgtggcgagatcaacttttccgccccccctgaacgtaggggtaaggccactggcaagccgatccccatccgagatcaccccacctgcatacaatccggtaatgcggatttcgctgcgttttgtttggttgaaagaacacggtgactccagccaaaaatccagaccccttactaagactgtttctagacatcttacgatcattttgtttgagattttggctttagagtaaatttaaagtaaatagagtagtttgtcactccgcacgataggctcagaaataaaagtgtagtttgcatagtttgtatgtttgcacagtttgcatgcttgcccacatatattcgtgtttatatgtttgcatgtttgcatagtttgcatgcttgcccacatattttcgtgtttatatgtttgtatgtttgtatatgacgacatcccttaatccttcaacttgttcatctccatacccaggtacgatggtcagctttcgagggtagctgcacctcaacgcattgaaagattctgggatgtctgttatacaagagtgagtgtgatataattcctgaaaaccaccttgtactcaaattactttcccacagaaccgtctgtggtgtcaacactcagcttgatcgccttcagcaacagatctcaagcccacagagattggaagccacagatatatccattgaatctcttgagtcaattggccaattgcaagatctcatcaactccatttcagtgacttccaagacccaatcccttctacctcctagtcggttggcagatttactctcgggtactttctctcgcctccaagtacagaccactctccatgaagagaatagtgcccaactctcggaccatgtatggatagcagccgcaaaggctgccgttcaggcatcaggactggtcatgaacagcctcctggatcaaacacttcaactgcacgatgagacctattactggggtgagatgctggggtctatctggtatagcggtctgtatacagtccagacatcaccagggcaattctaccgctggacgaaggatgcatgcgtcgctcaaatgtatcaagaagccccgtccatcactgccagctggtttcgattctaccagattgcccgccaaagtgcctggaaacttggaggacactccattcgcgctcatttgctatccccaattagatcatcccgggcagaaatgcgccagaaacgagatttgctcctgaaaatgaaagacctccatactagcagcctgggccttctaatggaaggatggcatcttttcgaagcaagtgactccgcgactttgaacccggggactatcaacccccaatggcgtactgccgttcacagagcagtggctctgattgaagccatttatcgtcatatagcacttgagcctagcactcacgaattggaacagggagtattcgctaccctggagagggatatcgacgtcactaaaatccacacacaaggggataattccgtgcatgaacctttggacttgatcgagcgacttgtgcatgttcttcgagaggagttaccaaaccataccacttcaatgtcactatttattcatcgtcacgggcgcccttcatgcatagtccgttattggctacctgtatcagccgctcttctttcaggaagtgcatcaatgaggtttttggccaatcgacaagaggaaatcatccagtggattgttgatatcggttccaccactgtcgatttctggggcaattgggttgtgcatcccgtccgaaaactcattgggacgatcagacatgacgaaaaaagcgagattgcaataatgagcaagaatagcctgctggctgatcgagcgagtctagagagaatggtagtggactttgtccgcgatcgcccggatctttaccagggtgtggtggcggataccaccaccatcattaattctgtcaaggagggtgatttgactcccgttctcaaagcatatgaaagggacctgcggtcgccattcgttggaaccgttagaggcgacctcgtccgtgcccttttgatccagatccagaagaccaaggtcgatgtggaaattgccatcagtggtattgatgctttgctgaagagtcaggagcttgtatttgggtatgtcagatcccctcccccctatgcttttttcaatcgttaatatcttttagatttgtggggttgactcctgggattttggtttcctttgcaactatgaggtggctgggtggtcttctcggcagccgacgaggtttgcgaaagggcaagcagcgacatgagctaagacgtggattgcggtatgatgctatcaaacttgtgtataatctcacaaggctaattctagtactttatatgcaggaatgtggctcgcattttgacttcttctgcggttctatcaaacgggactgtcgcttacaaggacgccgggcaattgatatgtgaggcagaggctctccttcagcatgttaagatgatttctggaagcatgcagtacgaagagttccgagaagacatccaggatctcttgaatgttcagaatggagtggacaagcaacttcgcgtaatcgaaaggatgagatgggcatatttccagtaggttggctacatgtattttgctatactacgtatcaacatacaactaagtatcagatatgtagttatgcaaataattcatgttttctatacagttgctgtcttaagagttgggagcccagaaatgtacaaaaacataccattgcattatattcgagacttggattgatatatgtgttttttaccaataagcaggacctatgtatatacattttctaaattatataccagtgtatgccaatatgtccactgtcagccttggaagttagtttactaccaccgggcatgatgctgcttacataacataccgagatcctccttaccgtaccgtcatcacctccactccgtaggtggtgcatcgttctacctcctttcccataaaacactcaaaaatctttactcctgtatgcttggtcgtggatcactgcttgaagtctacaatcctttcatatccctgtcctttgatcagattgggcagatcggttccagcattttacgaagctcctgataagtactcgtgaagtgaaaaccatcaacctaaaccacttgatcggattcatcctgcaacgactactcccactttacatcctaaatcatttgatcaaaaccaataccccttgtcacccgacttgacaaatctccggaccacctcggtctcctatccatcatccacggtgctactactagctttggcgcttaatttccactgaagtattgccataatcgataatggctggcacacggaattatgatttcctggttagtattcatggccgtccaaaattcgacaaatttccctataaagccccaacaatgttaactttgtcatagattaaactgttgttgatcggggactcaggcgtgggtaaatcatgttgtctactgcgattcagcgaagactctttcactccatcattcatcactacaatcgggattgacttcaaaattcgtacgatcgagttggacggcaagagagtgaagttgcagatctgggacactgcaggccaggagcgctttcgcaccatcacgacggcctactaccgaggtgccatgggtattctgttggtctacgacgtgacagatgaacgatcattccaaagtaagacccgcccgctccctctcccaattatgtctgaccttttttctttctttagacattcggacctggttttcaaacgtcgagcaacatgccagtgaaggtgtacacaagattctcatcggaaataagtgcgactgggaagaaaaaagggcagtttctattgagcaaggccaacagctcgccgatgaactcggcattcccttcctggaggtttcggccaagaacaacatcaacattgagaaggcgttctacagccttgcatcggatatcaagaaagggatggacacttccaagaccgaacaatctggttcccagggcgtcaatatagaccagcaaggctccggtccgaatggcaattctgggggcaagtgttgttagttgttgtatcactactctttgtcttttgcccatgatctcccccgtcgccgtgttttaagctaccacatgtttcttatttccccccgcgctttcttcttttccgtcgatatctcgtttttgttttactcgctacattatcatgtgccaagatctgaatgtccaagttttatgcctgaagagttggcgcctatggacattcgagtatcatacaaacttgtccatatcctgtgataccttgacgtagtttgtatacttttctacccgattctataatacattgtaggtacattgtaggtataatgtagcttgaaccggacgacccacttttcttgaatctttccattatttttttttttccctctttctcttttctcccttggataatcttctttatagttacttcatctcgaagttcatgaatagacccaagattgaagtctttatcacacaattgggacaatctcgttcaatcccactgttcccctcccccgaagttgcccctcccccaccaaaaaacccggaagactttctgtgctgggagtcttatacagtaaaatccgcccatgttctcaggattttaacatacccgacatagaagagaaacagagacagagaaaacaccaatcaacttttattacaaacacatcaaggtcctttctcatatcatgtctgacgcccgcagtttcactgctcgtccattgtcaaagcagcaggcacgcaaggacttcaaagatgcattccgtgtctatctatcttcctcttcgttagctgcgctaaggcttcaaacagagagcatctgcacgctgaggcaagccgatgggccgccgcagactgccatagcatggtatgcgtcagagaacatccagagcaccgtcatgcaaatatcaaggacactgcaagactgctatgacatcaagatcggagaaaaagtttctatcaccagggctgaaggttcgctagaaaatatcgacctagtgacattggcggactgttcagatcccgagaaaattgccaaacatggctcaatttcagaaagtgacagatcccactgggaatgggccttggatgaaaagcttctccgatgcgggtgtttgacgacgggcttgacttttgagctggagctcaagggccaacctaggagttttcgagtggttaacattcattcacagaaccctcactctcgtcatacactttttcaattcacagaggcttcgaaggtttcccttggcccagtcatagaaagaaaagaagaaaagtcctcagacatagccgtgcaatccactggtcttggaggcctatctcgccaaattgacgacatcaatgaatgcttgtctgattttaacattgatctgcggaagccagcaatgccatcattctatgagaacagcagagggattttactctatggaccaaaggggactggaaaaacaagtcttctggaacagatcgaaaaggccggctggaagcaaacattcaaaattggcatgtcaactttggggagaagtgtcaatgagggcgaggttaagctgcgcaatatctttcaggaggcggctcgctctaaccccagtgtcatcattatcgaccagttggaatttattgcccctaagcgaacctcggttgaatctcagtcccttgcgtctgtcctttgcgagaatttagatgctatccgaaataaatcgattctcgtggtagccgcaacaagaaatcccaatcaagtcgatgacgccctcagaacgcctcatcgacttggaacagaaattgagatacaagtccctaccgctcaggaccgagctgaaatactacatgccattcgaggaccagtatctgccggtttgaccgacgagctagtagagatactagcagaaaagacacacggatacgttggagctgacctttttgccctcctgcaattggtctgtcgcaaagcccgacaacgacaactgttggacaaaagctccacagccatatcgaccagcccgatcgaccagtatagctcgctccatggaggttccagcgatgatgaattggccatctcattggagatacaagaaacagatatcttgctttccctgcaggaaatccgtcccacggccatgcgggaagtattcttggaaactccaaaggtgagatggtcggacattggtggacagcatgatattaaaaagcgcctccagcaagccgttgagcgacccctgaaggtgagatttatattcgaatacctgaaaacccttgccttcaagactaatttcccctttcaacccttagtatcctcaacggatgcgcagacttaacgtgaacagtaaaaagggtgttctactttatgggcctccaggttgttccaagacactgacagtcaaagccctagccacagaggccggattgaatttcctggcagtcaagggcgcagagattctcagcatgtacgttggagagtctgagcgatcattgagagagatcttcagaaaggcccgagcagcacgaccaagtatcatattctttgatgagattgatgccattgctgctcgacgaagcagtacttcgggaggtgtcaatgttcttacgactttgctaaacgaaatggacggtattgaggagctccgaaacgtgttggtcattgctgcaacaaacaagcccgatgtcttggaccctgcattgatgcgaccagggagattggacaatattctttacattggccctcccgactttgaggcgcgtagggaaatcctgcgcatctggaccaagaagtctgtggtgaacccagatgtcgacttggataatctggcatctctgaccgagggctattctggtgccgagattgtgagcatctgtgaaactgcaggagatgcagcactcgatgaggaggaggaaactcagcaggagcaagacgtgcagtggaagcatttccaatatgcactgggacaagtgcggcggcaaatcacggatactgtcatccaagagtatgagagatggagagagggctataggtaaatacctacatatgtagactttactgtataataagagctataagtccttgaagccatttaaagaaaggtgaagtgagttgaagttcgtataaagtgtccctaggtgattaccgaatcaagttagtgccaaaatgcataacatcccttccctcaaacctcctctcttctcttttctctctcttggcataatatcctaagttcttcctttttatctctttcgactttcatattccaattctccattacctagctacttcctctacatatccaatttgtaccacttgaagccctgtgatccatttagcgcgccgtgcgctaaatcttcaacatgtcctcgagatcagctcgtggacaatcacctctccgttcaccagaacaggaccaagcacggtcccgttctttacatcgttctaaacctcgaagtgagagcccatcccgaagcctcacacgaagtccatcacaaggacgtcacgatcgctatcgttcaagaacccgatcccgatccccgtctcgtggcagaacccgatctcgcagtcccagccgagctggtcgccgtcacaatagccggagcgaaagccgctcaattacacccaacgctagccctccgagaagttctaaggtaagtgccagtctgttcctgctgtgatatagctgtctcccccccatggcggaaccatatctatgaaactaaaagctgatttccctttttcttaacagatcgtggtagaaaaattgacaaagaatgtcacagaaaatcacattcgagagatattcgggggttttggagagatagagtacctcgatcttccaatcaacaaagcttgtaagactcgctttttgactcgcgattccagattcatatgtctcctaacactcttacagtcatgacaaataggggaactgcgtatatcatttattacgaccccgctgatgcggaggcagccattgcccacatgcacgaggctcagcttgacggggccatcctaaatgtctcaatcgttcttcctcgccgtaaattctcacgctcgccaccccctgcgtcgaatcgagtgaatggcggccgccccagatacggcagagtcccatatgcaggcccatcatcacccagacggcacggaggcggtcgacctacagaccgccatgacatttataggcccaagactgcatcaagatcacgatctcctgttcgttctcggtcatactcctctagatctcgctcaccggcgctgcgcagaggtagtccccgtacagaatcgcgacatcaccggcgccggagcccaagctacagcagctatggttacagcagtcgaagtcgcagtccaaaccggaaccgagggcacaatcgaaagtaaacagcgagagttttgcggtaccgttccttgttgtgtatcggttcaactctagcgggggattacgtttgatctttggtgccggcaaccgaattctatcgcaagatatccagagtagctagttctacgcaatagttaacaaattccactgccactttgaaatgtaaggattacaggatttctctaggtagtcagtatgtataataggatataccactagttaagtaatatatgatagaagcaaagaaacaggggaggatggtaggactacaattttgtatgcatgacttggatggaatgtatcacctccaataagagaaatcatcagaaaaacgaacaccatccgatgtacattgacgccagttttttcttatccgttgcttgtatgatcaattcatccacctgaccatccaccgaaagtgcaatgggctgcttagacatgaagccgcggagtttgtttcgaacatcttccaaaacgccagccggtgtgtccgggacatttacatgggtgcgccgctaggataaagagagacttgttaggaggttgcttgctgggaaccggtgttgaaatgtactcactctcttcccaataaaatcagttgttggatcatgcaaaaacgtctcgagtacagtcatcaaggcatcctcattttgtcgcagcaggctaagtgtaatctcacaagtccttctgaagggacctataccttggagattagcgtaggagtaaaactcgaggatatcttcaaactaaccattgtacccgtaagcgccaaaggcatcaaccatgttatgagtcaatcggaatggtaccacctcgggcttttcgaacgtatgacccttgtcaaagagacagttaaaatcaacatgtaggaggccgcctgttccttcttcgaatgaaaggttctcgccatgtcgatcgcccagacttgtgtagaaaagaaaactggttagcgcgatggaactctagggcattaggcgaaagcagatggagggccctcaaaacattaaatggcgagagaacataccctagaacatatcccaccattgacatcacagcagaagaccgtgtataccttagtctcgctgtgaaccaagactctgtctcaggaaacatttcgatgaaccattcatgaaggaccggcgggagcctgcaactgtcagtacgctggactcatgggtgattgaacggaagatttacttggccagaatgttagtagtgaataagggcaactttgcgaaggttcgatcagcgcagatttcgttcaaatcatccctgatctcgtggaactattgcatacattaataccacagtccgagtattgtgttagatgtggtacccacgttcggttgaatgcctctttctcgtagcaacttgatgatgatatctctcattgtgcggagattatcaacccattcaatgagaccacattcctcattcagaggtgtcacagcgtatgtcttgatgtctgttggcgggttagcctttgtaattgcccaaagttcatcaaatcacttacacatgcgccgcttacttgattcaacgtctctttttaggaaccggttgatcatgttgttgaattccatgagacgttgatccttgcgtagatcatcttttggtttgcaaagtgcgttatagatcttcccatcagatcctcgtaggctgatcttgcgtggcttttgaagcgagctcaaaatctgtgcttcatccaaaacagctaatttcggttagtttgtctccgcgagaataggtagctaataacgtaccctcaatggttgttggatcccgaggaaaggccctgaaacctttaatatattcggtgttctgactagcagggagacttgggatcaacattgcctggaaagggaccactaatcggcatggcgcaactttatgattaaaccctagattacggccgagttggactcgagatgacttttcctccacaggagcaaggcagagttggagtagttcctctgagaactttgtaccttcagtgatcatgcgatggatttctgacgctgttgatgattccccctttgacttgctaccgtagtcctgaacaagttagtctctcataatctgtttcaggcggacgacacgtactatgatcttctgtaggcaattataaccccttttagttcgttctttattggaggacttgataacggcaagaactgtccagagaccttgctgtgggaaattatgaacagcctttgccacaatccgtgtcaacagatcatagactgtgatgttagggtgacagattctggcaaccacttgtggtaggattgtgaacagctacaactgttagctagctatccgggaaaatcacatttcgtaaactcaccagagccgcttgcaagcgtttgtcgatgaacttcttcagttgcgcatgcatctcaccgaggctcttcttgcgttgcgcttgtgtatgcctctgaaattccctagtgtgtgatgaatccgtcattagcaaacatttaccaatggccacaccacgaaactctttcttactcgttatcgcctctcttcgggtcaatgggctgttcaacaatcgaggcatgttcaagccaaagggtcagaagttttggtagagtctggaagacatatttggtcccatatgttagcgagcgaaggtaattgtcaatgacaagttttgtggcttctccactcaagctgtgtaatattggttagtctcaggtagggagtagcaggtctgatcaactgactatatctgagcttcctttcccataggcttcgctttctcggactctaaaattttgttgtaatgcttccctaggtaatagtgtgccctttcccacctgtttatccatcagaaaagaccatgttaaagcggcagtaatctaacttacttcggatacagcttgatagcctctcgatatctctgaacaatggcctgagagtgggtctggccagccctgtctgtccatttggctagcatcagatgagcctagacgcgttagtattctagtccatgtgaactgtatgcaacttacgagagcagtagactcattttgattctgcccacgaccagagagaaacgacatggcttcaatttcgactgaagaagatatattcggcgtaacttcgttggccgaaatcgcaccctctagagtctgaatggcttttcgatggtgtccatccttccaaaggagtcgcgcgtgctctatggaagccgacctgtctttcaaccgtgctgcattgagcatcgagtgatacgcttgactgttgaagttgcctttccttgaaagacgagcactggtgagccacgcagcggatatatcagaatccgcaaactcgcccctgtattccaattttagctatctatttcgtgttttgtaggctacgaactcacgctagctccattgtggctcgtcttaatcccaataggtattgtttatcggaaaggtagccacccaaaacatccaaccgtcggtctagggcacccagcaagcccgagcgtgattgacctgattgtgctttggcaatggattcgacctctgacaaagcatgtaaccgaagcatgtcattatggcatgcttgtagtgaggcaaccgaatttgtggtcagtgaccgggcaacgttgagcctgagctcgttgattttatcagtaaatgactcgtctttcttttgacgaagagcatcaagagccaagcctattccaacattgaactcttcagtgccttgtttggcacgaaggtcaagatatccctctagcttgtcccatctgctcattatccacgaagcttcaaccgcgaagggcaggaaccgtgaagccgccgactcattttctttgagaacctcgaaacgagtgagaacagcatctagataatggtgagcaagaagacagagcatgtaaaaactatctcatgtttgatctaaccttgttggccagattctttgagacaggtcacaagattccattgcgcatcgacgttgtcaggttccttctcgagttgtagctcgtaccaactctgcgccgtggcccatctcccagctttccggtgctcaaggatctgctggtcgatgtctagtgcggacaagtggcttgaaataccctcaattccatcgggttcatcaatctggctatagatgtcttgtaatctttggtatagaggctcgaggctggatctctcttgtgattccccgtgaaccttggattttcgaatgtactgttcccaatggaaaagtgccttggagaatgatttacattcaacagctcgcttagagatgatctcgggcggtattgaggacaagagattttcgacagacttgatctgcgatgagtatttgtcaatgagcgtgtcacggtttcgacctttatgggaacgactcgtatggttggaattgtgattgaggccatttaaatgctttttcttcccttgtaaccatcgagacagatagtctagcacttcaaagacgctctatcgaagaaagggaaatcgtcagtactgggaaaatcagtgaaattccacgaggattctgacctggctactgctcaaaattgtctcgcgagcattgttgtttgtctccggaatgggatgtgaaagaacactcatcaattcgtcttgaagattttgttgttcttgttcagtccctcccacgatacggttcaggactgtaaatggtaaaaggaacgaagagatggaaatatcttgacccttcacaacacgactcgatattgaaaagaccatttttgcgttgtctccattcccagtttgtagaagatcttgcaccagcgttcgaagccactcactgtgagtcaatctaggggaaaagagcggatagttaacctcagtatgattggccacaacagtgactgtataggtagatgtgagaaatggcgtaagagtgttgcgaatactttccggaagctccatccagcgttggtatttctcatcgccttgcaaatcgcgagagcgttgggtcattaccgcattcagtttgcaaaatttgagcaggccttgcatggcccatgccagaaaaccctgggccctagtattggaagcagacaagaatgcatcaaccaaaacatgctggaggaagaaaagaataaatgcgaccgtttcttccattctgtcaaagttggacaagacaagtatatccttcttctctttgatggtttcgactcggtttggatcgaggcagcccacaagccctaggcaccgagctgacaataaagtaatgctgtctgatgtggtactgaacttgacacaacagtccaacaatgacctagttaactgagcaatcacagggtctggttgttcactcagaacagagtcatggagaaattcttcatttgctgacagaaaaggggacaactccattagagcttgttcaacaacggtggcattttcgctctggcagcgacgaattaacgccagaaactggcttcgaacgtccatttgggctctcatgtcattaattttggcatcaaagacagccatctcaggaatggatgcaagggagggcatggtgttgaatgtatctcgtacaagactcgaatgattcgtcagaatatgatcgatgagttgacatgcgcggttcctgctctcgtcggtcagtttatcccaatatctgatcacaatcgctagcgtttgatcaattattggctcaaggtcctcttcgctaagagaacttatcaacgtcttccacgcggagaatgcataatcacacagttcctcgatctccagcgcagatcgaagacacgcacagacctgagatttttagtacctaaaattgattgattcgcaaggctgaatacatacttgaggcaatgcactgctaacatgaccctgggcgatattgatcatctcttcaatggctttgatgtttcttctcttctctgccaacgtttgcctcacttggaagtcattaatggcattcgcgaattgtgtgataataccgagaacgtgctcctcaatgaagtggcttagatccgctttctttgatgagcttccatgtgcaatctttcgcggaacaaacgtagctaatcgattcagagcttggttgaactgaaaactctcattagcggtccagaaggggtgggggaaaaaaagacataccctctctttcttttgctcgcccgcatcgccaaggctcttcagcaagtcacaagcaatgagaattggctcaatcctcaccaactccgccaaagaccgacccttaaatgcggggtctatgtctgctagaagagacatgatcataccctccgggttgtctgatttctgagataggaggaaagcaagaattgcagccaggttattcttctcagagcaaacatcaaaagcagactcgccttcattgcgactagccccaattctgcaaattatatctcgttttcgtgtcagaactaggtagggcaagatatggacttctgtcaaacgtaggaaaccatcaaccttcatgccaagcaaatcacatagctgttcagccatatacgggcgagattggaggtgcttgaccacagtcaccgatagggtcctccagtaaggccgaaagaggccagcaggtgtcaagaataattgttgggcaagtttagataactaaaatcagaggtgagctgtcaccatgtctgttgaaatgaagagcaaaagtaatcagaagtataatctcgggggtactcacctcgttataagccacagcgcaaatgtaggggtttggatgaccaaggtactccaagagccgaaggagaatgatgttcttctcttcatcttccgagccactagatacaaaaaattgtgagatgacatgatgataattttaggaaatagaaacgcacattgctagcccacagagtgttatgatacaagcttcctgtaatggcatatcatcttttccggaaagatttttgagccactcaagcacaacaacgaaattggcccgacgaatatcagttgataaatttgagcgcacaaaagctaccacggaatgtctatataatagtcagtatacagtgctagtgtgccttcaaggactatggaacgcacccagttgcaacacgcaattctctgattgagctgcggagcgagtgcagacagaattctccgaagtcagagtttggaatatgcatttgattggaatttggggcgtgcataagaattcttctgagtgcaatcattgcagatatccgaggaccaggcgtgcgtgtaagcctgggtaggatgaaattgaatagtgaccatatctcctcgaatccagaatgctcctcatttcccgcatgaccattctgatattgacccatatcgcatgtttgacaaagaagcgtgtctcgttttatgacatgcgaggacttcctcaaaagctgccctgccgttgcacagcagatttttcctaggatgtccaatagctcggtttttttagattcggacagttcctcgtaagatgcccttttacacaaataaatcagcatttcacaccttgaggggtatctgttgtccactcactggatggaggtgcgtagatctgccatcgttttgccacagtcagattgaagaatcgctgatatatttcccataagaaaaaaaaacaagccatgattagtaggtcctgcctctagtcctgggagacacagccgcttcgatgcccgggcatattcattcggctccgcttggtgtgaaaccccggctctctggaatgccgtatccgattcctcgtaaatttcccctattgaccctttaggtgagcacacagtcaacggtggtactgtatctagaagctgggcatgcaaggcctggagagaactctgatctggtattagctcggtgacccacctgtgctagacatgagataaagcttacccagagacacgactcaagggactggatgctggaattgtcgtctttgacattagttaacactggaagcagggtctccctcaattgttgtatcagaggctgagaagattttgcggtttctgtcaaatcgcgcaggaagcgacttagaatgacctgaacagaagacaactttcctatgttcccaaggctcagaaagccacacaggcattgggaccaagtataagtcaggctcatgtttgagagcagtccagccaaagtcgattctggtacacagcagcgatgcaaatgagtcaaatattgcagaggcacaattgcatcttccgaggtgagttgggctcctttcatttgcaaccactcgataacaacctgtctaaggcgatggaaaccattcaatacccacgagaagttttgccggaggatgaaatcatgatgttttacacaggattgcgtttcgcccttcggattgaacgaatcaagcaaccgagaggctagagagattgtctgcggaaagcctccaagggccgtaatgctcttgaataatccaggggggaggcctagactttgagtgtcctcaataagcgatccatttgcggcgggtatcgacaaccctccaaggcgtgtaccccaggaactgctacgttgaaatgtttccagagagcacaaaatatctagggaatgtcaatttggcccaaatttttacatcatcgggggctagaaacggacctgatgtgcaagcacgcaaaaacgcagcaacggcgtagcttgcaggcaatggacggactcgcttgaacttagaattagctaggcgcgcgcaaataagttgaatcttttcccggacaatctcggaggtccaggtggtggcgagtcggatcagtcgtaggattagccaagcgaataaaggagcatgtgtgtcctcacccaggatgatagggtcggagggttcccacagagcttggggggctttctcgatgctggcctgaataatatctaagcagtcgaggacttgcccttccagatcttgctctgatgtgctcccgtttgggctaatctctaagccggcctttaagacaatgcatatgagtttgttgacatcagtgacaccttcgtcaacgcgtagttgactttgtatctcactaaagatttcctcgcgaagctgggcgaatgtttcccgggttaagtgtgattcgtttccctgggttgcaagatgcggtacgaaacgcgaagcaaggatcgacgaggcaggttcagctctccaagcgttcccaggcgcggtagcctgctcattatctccctcgattgccatatgggagacacatgttcatgggaccaggtttaaaaagttcaatttctcgtgtttacacaaattccgaggccgggttgtgttcgtgtgggtgtttgaagtgcgcagatacgcggagagagttgatatgtcgattgacacctgaggcaccaagtatccactacacgcacacactctgtaatatcagagcttagttgtgatcattgaataccggtttgtaaattctatacattagccttatatctatcaagtcgagtataaaggcctgggatggtgtatggtcgggtcctctacatcgtgtatattgtagaaaatataaaagaattaaattcgaaaaaattcgaaatcgagacattatgatccaggaagtcttaagagagttaagagaattccggagtatgtgaatttcacatatcatgttgggccttgtgactcagagagttagtcaacctcactttgaaatttcaggtaccaccaccacctactccttaccctcttctaacatcacttcctaactctgagatacctcgccagtcaccgaagtcaactcagataagtgcaacatatacagaaaatatacatttcgaattggctatggagttcaagagtgactccgtaatggatgattcgagacatggatatttcatgaagcaagccttgttgatggtacgaaacttcttgatgccgggaaatcgaaaaatgctcattgaaaaaccagggcgagaaggctctccagtcaggcgagacacccgttggttgtgttctagtgtacaacgaccaaattgtgggggttggcatgaacgacacaaacagatccatgaatgtgggtggcttctaaagatcccattaaataccgctgaccatccccaagggaacgagacatgccgagtttatagcaattggagagatgctccaaagctactctaggtcggcattgcaatatactgatctttacgttacggtcgaaccctgtgtgatgtgtgcttctgccctgaagcagtaccgcatccgcagtgtgtactttgggtgcgccaatgatcgatttggaggcactggaggtgttctttcattacattccgagtcagtacatcccaagaaacgccgtcgaccgattgtgcagggctaatcggatacagctcctcaattgacccaccataccctgtctacggtgggctgttcaagacagaagcaatcatgttgctccgtcgtttttatatacaggagaacgaaaaaggtaggaattagcacgcacataccccaaccttgattacctgctgattacattgcagctcctaaccccagaccgaaaaagaatcgagagctgaatactagattcgaaaatggcaatgaagaagcgccccaaacctggtaggcggcaaggatgagatttagggggtctccaaaacatcattttactgcgcaatacctccagggctagtctgaatttgcccccgatacaagcggggaatcattactaccaaaggacatctccatataagtttgaaaagcgtcaatgttgatcagaacgggaatctgtattgtgaatatcaattgcgcccccaaaaacacacacaaaatgggatatgtgtacaaatctgcaacactgaacggaaaggctgcccatcattctttttttctttctagctgatggtgtatttcatgaagagccagtgcgctctgcctccaattcttgctcggcttgctggtagtatttggcagtgtccacgccatgctgatacaaaaaacaatcaacatcatccctcccaaatcgactcaaatggaggacttacctgatcgtggttgacaaagttgaaccatgggacaacatggatgaagagttctgagtaccgcgagttgcgggctgccatgccttgtagatgaggcgacatttgggatttaccgtacagaggctcgcccttcttgaccttatcgaccatctcacgagtatccatctcaacctccctagcattctcagtgaagccgtagaagcgctctgtgaaggtgtgagtgagatgtcatccaaaaaagcgggtcagagttcaagtggagggatatgacttacggcaggatcgctgatagagcacatgaagaccgccaagcagaccaacagctgtcgcgagtcgcataacaggagcgaagccaccacggcctacatgcgacggacttgctctctccatgatccagagcgagatgggagcagccgaggccattccgccagccacggcccagtcggaaggccgggcatatccgaacactcgtttcaaatgcctgaaaaagatataagcttgtgataaaatcctagaatccggggtaaagcgtacgggtcggaatcaatcaactgtgggatatgttagccaaagacatacgcaagcaatcgggaacggaaacagtagtagccccggttcatgttagatcaatcataccgggtagtcagtattggcccgcttagagggcacaatggctgttttggtatcggtcgccatgttgcttgaagtgtggatgtgcaagcattcgaggttgaagttctgggagttggaggagggcgaagctaaccttttggggactagcgcaatcaaggcggacaagaggtctgacagccaatcagagcgcatgtaacaggctactcgcgtcacgcgtcaaggtcgcatctgattgattgacattgaatttcaagatagcatcccataccgagtacgccgtacacaaagtccaactgctccaatccaacagccaggtttttcttttttctttttctttttcgttcaccttcagttatctggtccagtcaaatcgatcacttgatatagttgtacccacaacggtacctgcacgcgattagaaatatggcgaacgcgaatgtttcagagagaggaagctcaccaacagcagatgatttgaacgatctgtttgattatgacattggcttggatgagattattccggataataatgctcccaataccaacagcaccaaggcctctgggataggagattctgcacttggtttgggtcttgatgaagaagtcaaagtcgcaaagaaacgacaacctgtggctaaattagatgagggccggtgagtctcacttgctaccttctttcttgattgaaatctgttatttttttgttttgtttcgggagagcatttggggctgcaacaatgctgacgaataggctagtttactctcacaaccgggcatacccaaactacgacatactgctagacagaagctgaaattcaagggcaaaggatacgaggtttgttctcttgtctatccaaaattcctaatgcatggctagtgtaactgacttgagttcgctatagttcaaagacgccgcacgcctgctcaacttttaccagttatggctcgatgacctatttccacgcgcaaaattcgcagacggactgacaatgattgagaaactgggacactctaaacgcattcaaaccatgcgacgagaatggatagacgaggagaagccgagactgttcgatagctctggacccacgcgagaagagctcgaaaatcgccacgtccccacggaccctgcagattccaatcacaacccaaccgcgattattatgggccaggaagagattgccgaccaagacctatttattctagatccaaacgagagcgcggcgcctactgtcagctaccccgagcccgaggacgatgacttggaggatcttctcagagaacaagatgagccaatgtcagattttccacccgacaggcgtatctcatcttcacgagcaccagatgacgataacgactatgatgccgaatatgaagcgatgaaggagcttgggatgtagttgtggaaggcattttgtacgatgagtttttaatgacagcaatggtatatgtttaccccgggataaacccgctggttcctgtttaatcgtttcgtttcggctatgtagggctcagcttgggattggccgaatgagtctgaaactaaaattactaggaataccacattggatcacatttaaggaaaaagaattaatttcaaataacatgctaactgagtagaataactggagactgcaaagcaactcttcatgtactgccccggaaacgggacaagacgaagggagagaaagagacattagatgttacagtaaaggatgggccaattgaatatattgatctcacgcgctggcaggctccgtgaacacagagaactgaccaccggcacccgcccagttcaatttctttccacgagtagcagtgttatcgataacagtagccacctcgatgtcatcctgtgtaccttgtcccgtttgataggtagcagagaaaccccatgaccatgcacggccatcggaatcgatagcgagagaatgatccgaggcagccgccacaaccttggccttgatacccggaacaggggtaggcgcgatcaggatacgggggcgatcgcgctcatccttgataacggcgtcatcggaaagtgtatcgatcttaaggccgctttggaaaccgtcaagacggccccaaaccaagcattcaccatcgccagcaatggcaatcgaatgatgagcgccgccgcagatttgtgaaatatttttgtcagaaagtgattcgacaagagtgggatgcacgatagcagcttcatcgtcgccagcgccctcgcggagggcggttgcaccgaagctattcaatccccaggcatagaccttgccagtggcgtgaacagcaaacgagtggtacgagccactcccgatgtggacgatgttcttagggagaccgaactctcggggctgaagaccattcagcctgttgcgctccacgatcctgcgaccgagctgattctgttgtcctgagccccacgagtagacgcgaccttggtcgttcagggcaagaacgtgattagctccgcaagtcaggtgtttgatcttcttcaaagacgagatcaaagttgggatcgtttgaacgtgagaagacgcgtcaaatccgaggattccatcgttgctctagaatcgttgtcagtaaaagcaaagtaattcaaaacagtcagttcgtcttactcggaaggtgccccagccatagactagaccatcatcggtcaaggcaaagcttgcgctatcggcggcggcgacttcaacgaagacagtgccttcggggaaagcggtgacgggaatagcagtgggaatagactcccgggggtttaatccactgtcttcatcatcggaatcggaatcgctgtcgttctcaatgtccttgtatccaccgtcccattcagtttctcttccgagcgcaccctgatcgttcacaccccaggagaatatcttgttgtcatgcgttagagctagacagtgcatgccaccgacagcaacctgtacaactccgacttcttcggcagacagaagcttattcaaacgtgggcgcttcacatcgataacattcttagctgtgcccaaccccagctcaccagagctaccctcaccacagacgaatacattcagtttagttttcggggcctcgttgatgataactttgactttcggctttggctgacggggttgcgcgacacgagatcttttgatttcgcgaggtttctcctcatcttcatcagctttgcgcttcttcgtagcagaggtcaatttggtagatgttgccattttgcttggcttcgcagttgacttggtagatgttgcagtcggcttcgtagtggactttgtagtggactttgcagtagcctttgcagtcggctttgcggtaggtttttcaatggacttagtggtggattttgcagctgcctttgtagactctttcacgggggtttcggcctttgtcatagtgatctgcctggcgctggtgcgtagtcgagtacttctctttaccgtctcggttgaagcctcgacgggcttggacgtgttcttcttaggaggcattttgcctcaaactgggctattagaaatagcaaagaatgagaaagaacagggggtggggaggaatgtttgagactggaagaataaaagggaaaaggtatgtgaaggggaaaaaagagaaaaaaggacgccaagccaaaaacagccaaacaatagcacattctctccccagccacctcaatgggctgattcattgacattcgttgatttttattgatgattaacgcgttgttacgcgtgaatatgttttctttattgatctatctatgaattgaagagcattatagaattacaatagcccatcactgcatcaacggctggtttcttcacgaatctttccacacataatcacattttgtcccaatggcatccatttaacttctcgaggattcaacgcagcattgggtgtaccctcttgatcttgtttcgagtcagggctgacattcactccaccacggcccaggtaggtgggagcaaccgtgacaataatcgagtcaatgaagcttgtatactctggattcaacaattcactcagaaccgtaccaccgccttcaatcatgacacttttaatgccctccgatgccaaggcacgaaagacggcttcccagcgtaatcgccagtgttgattgtattctacaatgcggagaaaatctccaccgtagcctttgagcatcactagtgtctgagggttgatttgagctcctggggacaacacaacccatggagctttgccttttccttcaacggcagtacgtaacatccggcattcaggatgaataggccatcggcccataggatcaatgatcacgggccgtggttgccacattctccccaggcctccaaatccaccggccccttccagacggcagttcagacctggattatctgcaagaacagtccctactccaacaagaatggcatcgtgtcgggagcgaagataatgggtcatcaatttggcctccggtcccgacaataccgtctgcattcccggttgaagagaaatcttggagtccatcgacgatgcgtacgacaatgtgacatgggggaactctcggcgttccgagtgattaggaagataaggatgtaagaagtctagcgaaaactgagggaaggatagtgtgtccgggggcaaagctgacgagatcgaggttggttttgtttggggtgacacctcgttgacaccatcggtgctttgagttttaacaataccatggcccttttggtattcgtagccctcgtgtgcgaccagattcacctctgggttttgtatacgccacttggcggagatattgcggacgtccgtcacagtgaagaatcgcccgccagcctcaccaagcttatctggctcttcctgaaacttggtgtaaatggaagaagggagatatcccttcacagattctttgcgcgcgtactccattaatcccgagtttcgcttcactcggtcgatgtagtcgaggtcatgtgagtggatgctgcaactacccggcgttctcgcgatggtgacggtcgagtatgcgccttcaaaccggacaaccttgatttgaaagttacagatgcctccctctcggactcgctttttgcgagggcgcttgccttctggtaaggggcgagtttcagatgtgcggtgtgttggacgccgtaaacggcacatgtaatagtcggtggtgcaatggccctctttgctcgcatttgatctttgtttgacccatacattgtctataaaaggccaatatgtttcaaattcttcgagactgatttctatcgggtccttgcactcgaacaggaccttgcgtatgcgtgctaggttcggtggattgttgaaaaggcttggggtagccttcgcgccttgactcgttgatacgctgctgctgtgagcatctccgattgtcgcattgcgctgtgttgactcgttcccgtcaccgtgtaatgcttgtttatcaagggcaccggataaattgatgggggttgtgatttcgggcaggtcttcgtccgttgcgtctcgtgtatcgcaggcccgtccgatctcttgatctgttcccagaacgtctttcgcttgcaaagagactccgttgtgcggggatcccgcctcgctgccagaagcctctacgctcgagacggacacgtcggaggcatggtccatcctgggggagcgtggcaaaatatagctatagctccttattcctagctatggcgacaaatggccatttcactgcggagtagccctaaatagacacacacatatatatatacacgatatagagcaaagtgtcggagaacgagcctcgggaagaacttagtggggcggaaacatgaaggcccggagatgttatccacgttctgaggtcgagtacggagtatacatgtagtatatcaacagccaccacctacatgtaccaggggaacatagtccacagattgattcggtcttagaagtcaaatagaaatccataagaaataattgatcattgcatcttcgcttgattgtattgtcggagacaaataagcacaaaataagtattccagtatctcagtatctcaaatcacatctaatatgccccgatatctgccccagcacgagccagagtctcatagacccgtggtggcaatttgtacttgaccattcccgagaagaccatgagatccttggccatgacaagcaaagtatccgccaatccctggcgcacttcactgtcgtaaactccaaaggttcgtttttggcgttcatagccaatacatgtgatgctccacatgatgacaggtccgatgttgcgtgaaatgatgggtggcaaagacgaaaaagcttgggccgtgcttcgaatgtacgacacggagccctgagcttgcaaggggagaatattcaaagcgttgatagcctgtaacgttcattagtaattcaatcatgaaatagaaccatgggttggagacacctacatcaagagctggcgcccatctgccggcttcaacctgagtctttgcttcgatcatacgcaacagcaacccacaagcatcacggttgacctgtcggatttgcccgtaatacattatgtctgagtcgtaaagactgatcatgttcttggcaagcacgcccggatcatccacggtagtcaaactgaggctgctcccggcttccactgcctctggctggctatcttgattctggtcgacccttgggcgcaggggctgcagtttcggcatggcaccccctagttcaaccgcgattgcatctgacaatgcacggttgatgatgtcaatgacacgatcgtagttctctgccaagtggtacagaagcacggcatccgcgatcaatcccttatcatccgccacggcagcagcttgaacggtaatagtcttcaagaattcttgctggtcgaccaacttgatcaaatcgagacgttgctcaatggctcccttgaggcgagtaccgtccgcccgaatatcgccaagcaatttggcaaagtccctggtttctagaatgaactctcgcaaggcctcatggcagactgatgcttgggacttgcccagagcgcctggaagatctgcgttgaggcagatcagtgtaaagtaatcgatggcagcttcgacaaatccagtgcggaattctcgggtgtattgggtcaagagatatccgaaattgatctgggggtattgcttgactgtaaaggaaactgcaaagggagaaaattttaggtcagcaagatcataatatcatgacagaagataggcttacgaatttcttcaccagaggtgtaaaagtcggaaacgcgcaaaagaccataataggatagggcgatggcaaagtgaacagcagtgactggggcataggtgccgagataatgcacagcctgctcaaacattcctcccaatatctgcagcaggaagtaagttccatagccaccgggtccctcattgcccttgatgaagactctttggccaatttcctggatgtcggtttgaatatcctccaggccgaagacatcacctgcaacctcttcggcgcggtcatcctctcttgcaaggctgaattgtagccacatccagtcctcgacagtctgcttaacaccatccaagcgacgacgggatagatcacagcggccaattatcttgtagcacgccattcggtaaggatcgactgtattttcaggtgcgttccgcgatcgttgctggaactcgccattgatcttttgctgcaagtccctgggcagtctcctactctgcgcgtaggttgtcatgtaggtcacaaatttgtgatctaaagaccggaacccgctgtcccgactcacgtattcagcagcctcagtgacaaagccacatcgaagaaggtagaagatgagaatccagcagtagtcttggttcaccatttggagctcggtgccgtcaggtgccagatccttcctcgcggcttgaagacggatgtaggcgcgaatcttgttgatcacggttggaattcctcccaattgtgcttcccgtggatttttcgcaatggcggtttccacttcgtcgaagaatgtgctctcaaggaaacctctcgaaccttcaaggatctgtttcttgagttctactgctttgagagatttggacgattcttctagataatcttcggcatactgtcgctccttcactgctccgggctccgatggattcatgatgtttggcttctcgtgaacaattcttatcaaggcttgatatgcgttgaagagttgccgaggtacctagaaaatgattagctgggacaaagatacaggttgcgcgaaattttgaaacttacatcaccaccagcttgcacttcaacatatgagaattcgtcgagtatgggatagcattttccctgaagtctggcgaggttcaactgttgaaccttctcggcgtagtggcccatcttctcacgttggaacctgagatcaggcgagtgagccgcagttccctcctttcgctcagctggatcctcaaatatttgacggcttgccaagccgaccccaggtgtgccaatcaccgacttctcaagaccggaacgtccgaatacgcttctgcgggatgccgttggaggtccgttggctgaagcagttccggtttgcttagactgccgtgttgaacgcccaaaggcacccttggtggtagatttaagtcctccagcgccggcagcatccttctgggatagcccgaaatgatggaatattttttgacgttggtcttcccagtccatgtccaccttctcctctaaaaaagcatcgaagtcccgctgagctctggtgagaccctctgcgatcatgacttgtcgaccacgttgctggatattccgcaaaaatctttggttgtctgggtcaaagtggtccatttccctcgctggagctgctagagatgcctgggggtccagggacttgaggtcgcgcaatgcttgtcccggggatacgccggaagctgcgagaagataatgactattgatggtgccgcaaggttagtcaaggtcaataagaaaacatgcgacaagatggaactcacgctttgctgttcttgccgtttggggtatccttttgtcctgtagagcctagctctcgcgccttccttcgaatgtcatccaggcctaactggagactaggcacgtcttcgaagttgttgttttgaaagaccgatgacaatggtcgcttttttccacgttctaataggctgttgaagaacgcaggttgtgttgactgattcgcaggttgtccctgggtctgcaagttgctagcttgttgtgtctggcccaaggtcggggcttgagcgggatgttgctgggcctgagatccgaacagagacgacgtttgcgcgccttgcgcacctggagcagaaaattttgcgaaaggacctgccgtctgattgtttgcgccaaacaggctgtttgactgtggggttgtcgaggctccaagaccccccccgaagagagagccagtgttgaaagccatggagggctggtaggtgagaaagctttgagaaagaagatctaaactaagattgcagaaaaactattctttgaattagttcactttgagctgacaattgagctgacaattgagcaaaatgatgctgatcaaagggcaagaaaactgcatacctagggcttcgtaacagtaaagaattaccacgataagtagtggattttctcggacttctgatagtaaggaacagagcttcagcagagctctgcttttatatggataaaaaatagccccgcaattaagagtcaatagattgtcaataggcaattgaagaggctgtttaggaagctcggtctaaacaattgtatcccggatcatcgattgaccgattgaccgaaatcctattgttcctttatttctcaatgaccggaaccattgaacccattgaacccaataaaactcccattcagtcctccactcgataatagtgatccatagattgattcggaaatatgcctgtgttccaatccaaaacctttcgtcgggcagctacggaatcatcgtccctcggcgaacggctcggtgcgttctaccgggcgcgactggctcgacaccctttcattctcttcggacttccattcatggccgttattgtagccgggtcatttgccttgacgcctgctgctgccctacggtacgagcggtatgaccgcaaagtcaagcagctcagtcaagacgaagcatttgatctcggacttaagggtcctgacggggaagagggaatcaaacgcaacccacggaggaggattataggcgacgaaaaggaagaatactacgtatgtattgttttattgtttaattaatcctgactttcttgtctgacatttggactgaatgctgattattgtatacgcttacagagactcatggccaaagatctcgatcaatgggagcagaagcgagtacagcgattcaaaggtgaaccggatggaaggctgtaacactttgaatttaaatatccgagtgcatcctcgaaggcgcggaaaacacgttttcctcgtgacctcacctggcgcatgagctcaagcctcatcgctaggtgtacgttgccgtacattgctgtgtggagatgaaggaggagctcagggggtgcagccactcgattatctggctggccttcgcgtacgacgtatgctatgctccaatatccctacttaggtagccattggaattggtctcgctcactttctcagcctctcggaagttgtatacaacatacaatgtctatgcttcctggatcctatatactaggccattgactgtggaattcggggaaatatatatttccgcccctctccagtctgttgcctcaccttttctgtatggaggtgaaacctgcatgggtgggaccactccacggttggttggtcccttggagccttgcaactaaccgggaactgggatgaggtcattgttaatattgattcaacataattcagtttatgaatacaccgatatacaaagtatatattgatctataatgaaaggagacttactcggccagatatagctactaccgggctcccaattatctctgtagtgtgagctacctctatatatatctatgtatacagcaatcactatttaactattcgtttatcgggaatatatgtactatatatagtgaaataaaagcgacctacaaaaaaaaacatacaactacgtcaggactgaaggtgaacccgtgatcccccacacaataacgtcataacttttcttctcgaagcccccaaatttcttcttcacccatttcctctcaactcagggctagttccaggcgattattaatcatgcaataacacagattctctctctgatatcagacctgttcatcccccactatttggcatttttcgttccattggccaccgattttcttctttggctggaccctggtctattcgcttcttattgcccctctttgtctctcgctacgtcagttgcgtatatcgtgaggttcttccatctgaagttttgcgtacgcttcccttcactttctatttgaggaacaacatcggtttcaactttgtgtattggatgccatttatgaccagcgattctcttcgttcctaggtcttcaaaggccctgatatcttggtccgagagcttgggagcacttgtcagtctcacccttgagcagccgcttgcaattttctgatacgcaactacgggtgtcattgtcagagagttttgagctgactgtgtttcctcggaccagaaactggagtcgtggaagctaagctgcctgccatgacaggccctggacgctcaccctcctcgccatgggtacaaagtgcacaaggtggtcatcatgatggtggtgtcgcacagtctatccagtctaccatgtccccaccaaccacgggcatgatgtcgagcacggcttttacagaaaaatcaagtcctaactattttggtatggctgtgcaaaaccccaacaatcaacagacttccaacccagggctgtccatgcaaaataactggggcacattaccccatacgcaacctctgccgagtccgcaattaccagtgttttctcaagaatcagtatcagcgggattgaagaatctattgaagaccgagcctgaaactagccgcatacgccgagaatcagcattgcatggatcttcttctccccagacgacttcgtggtcaaagtcctcatcttcacatccgttgggaaatttctcattcgcacaacccagtgaactgaggcttccagccggcaaaaacttagcgcctactccacaaggtatgaaaagtcttagatttgcttttggttttttttttttgtttgtttttggccctataacttcctgatgtgttccactgcctatcttttacaaattatacaagacctaacactgcttgtttaggattcactcccgcttcatttccttgggtatcagccgaacgctgcgccgaacgtcttgaatcatctcagtcaaatactatgttatttgatgttcgcccatttgctcacttcagacaggccaatatcaaaggatcactcaatttatgcattcccactaccctactcaagcgtcgatcatttgatacccagaaattagagggaactttcacagacgacgccgataaacagaatttcgctcgttggagaaagtgtgacgtgatcattatctacgattctgccgcagcggagttgaaggacgcagcacctcttctgaaccttctcaataaatttcaggctgaaggctggaaaggagatgggttgatcttacaaaacgggtttcgaggtttctcgggtcggtttccacatttgattcagcagccacagacacagacgactggatcatcctctaaacgcccctctcccatgagaatcaacctgcaatctgttgctcctgtcgtgggtggttgcgccctaccagaatcatcctctgccgtcaatccattctttggaaatattcgacagaacatggacctccttggaggtgtcggacaaattcctctgaagcagcccgatcaattgaccgaagcaaagcgacagcaactcccttcctggttgcggggcgcttccgatactaaggaccaagggcacattgtttcgaacaaattcttggttttggagaaaacggaactggaacgcatgaaacaggctttaacatatgaaggaccttcaggtgacaccaatggtagccccaagaaatatcgcgtcgcgggaatagagaaaggcacgaagaatcgttacaatgatatttacccatttgatcattctcgtgtccggctcgagggaattccagctggtgcctgtgattatgtgaatgcgaaccatatttctgctgaacttaccaatcggaaatatatcgccactcaggctcccgttcctgatacatttgatgtgagtagcagttcctcacaatgcttgttatcatattgctcacaatatccaggacttttggcgcgtggtgtgggagcaagatgttagagttctcgtttccctcactgcagaggttgagcgaggacaggtgaaatgccatcgatactgggagtctggaaaatatggaccatttgaggtaaaggcctattcggaaaaacatatctacatcgaacccagagttggcagtcccatgccgtcgaccgaacggcctgatggcacaaacgaaaatccagtgatcaccgtgcgaaacttcagtatctgccatacgtcattcccttttgagccgcttcgagatatcacccagctccaatatccttattggcccgatttcggaacaacgtcacagcctacccatcttctccgcctcattgagcaatgtaacaaggtcattcgtgccactagcaaccccagctttagtagtgagcaagcggaaccaaagggtcagcggccggtactagtgcattgcagtgcggggtgcgggcgtacggggaccttttgtactgtcgatagtgtcttggacatgttgaaacgacaacgtgcgcaggctgctggtggtggaggcctggatcaaaatcctagcggatcttccgagtggatgggggatttcactcttgacctaattgcaaagacggttgaggatttccggagacaaagaccgagcatggtgcaaaacctgagtcaatatgcactctgctatgaaagcgtgcttgaatggctcgcttctgagatggactagaacaagtccttggacttttcttcttcttcttcttcttcttcttcttcttcttcttcttcttcttcttttctcttgctatgatgacgaccctgggatacccctttctggccttgcattattaccagggccatggttttcttttgatctatgtacaatgtcatacagctagtggttctgcattttctggtgtttgggattgctttgggacaggggggaaaatggacacagctaattttcttgggtcttattgcgcataagagacaatggtagcgtcctagtctgatgatattcaagaattgcgctatttcggttacaatccactgctttgaagagggcttataaccacagttcaacagcctgactttcatatcctgggcaacagaagtttatcaagctctttgtcggagttgtttatgtactattgtaatgcccctagcgtttgacgggccgcttgccttttccactataaccgatattcaggaacatcactccgcgatcagtaatcgcaaccagctcgtcctcattttcagtgaaccgcaattgagagcaaacggcctctaaatgaaggacaactggtcgcaagtcgatggcacctgtagacgattcccacgatgatggataaaagccggtgctgttctcttcaatcaattccgacggattcaatgcccagacatagagggttttccagttagcgacagcaacacgagttccgcgacgcgaagttgctaccggagatccatgcgaagttgttacttcccggaatcccccaagctgcgccacaatctgccaattttcaaagcgccttccgcggtcaagattcaaaacatgggtacaccgcggaccagtgtatgattcagacttgagtagacatgccgcagtccatttttcaacgcggtgggtggcaatgccgaaggcaaggtactgccaatgacagtgttccccccggtttatatcgccgagctcatgagtaccgaagaatggtattccaattgagaattgaagcgagagggaagacgaaaactgcacggtgcatgcattcttactaacatgcggctttggctcgcctgggggggcagggatgcgatcaagtctctgaaaggcaccgtatatgttttgagctcggtagtggtagagcaactgaaagcctcgatcattgaaagccaatttcattacgggccctagtccccgcgaagaacggacatgtgggtcttgatcgttggagcttgtcagaacgtaagcctcaaaaccagcatctagagatgtcagaaaccagttctaatatgacagaatgacgaaacgaacaagtgattttacagggattgtctcccttacttccttctgtgatgccttcgctagaatcgtcttcatcttcgtcgtcatcgtcatcgtcatcgtcgtagatttcggtataaagaaccacgtcatgatcaaaggggtcgagcgtgttttgccatgatattgcaaatttgtcgttggagacggacaaagccagtggcttataatctcggcattcgggaaagtcatacaatcgaatggtgtttgccctggaattcaagcgatggttggccaggtgaatactcccgttggggcaagacttgagggcgtgtttaacaaatgggtggtctgtatccagctcttggtctaagaatggtctgaatcggtgaaggacgtagactccaccgttttcaccaaaggcagtctggaggatttcaacctccccaagatcctgtcctggggatttcaatttgacttcggtccgatccccatcgctcatgtcaatcagatggacggtgctatgccctttaaagacaagtagtactcgaatgctgtcttctgatgcctcaattgtcgatgcatggtagtcaatcactcgattttgatactcataggtggggttggcgtaatgctctgccccatctaactgttcatacgagcgcctcattaactcatcaaacagatgcctagtctgataagcttcaatcccatcgttccaaccaggagtattatgcagctgatgaatgatgacttctcggctgctggaagcaatctcataaagcctgcggcttgaaaaggctgcctggaagtaggctggtgtgttgcagctccgaagaaccagttgtaccaactctgtgggaagttggagcagcatatttgaggtataatattgccctaggtctaacatgagggtttagcatatacttatagagcttctgtcaaggcacggtgcacagactttttgttgcctcgtgggtctaggtagcagcgccaggtatggaacaggcagaaggggagaaaatgatgaaatgaggaaagacaggaaagataaagacagaaacccttggaagacaaaaaggtcgagaattcaaggtatcactagcggtttcagctgtttacccgtcatacttctgaaatatgatattttgtcttttctctccgccttgtatatatatactagtacacaggccccctgcaggtccaactacggggtgtaatatacaagaatacacgaatctttatgattggcttaagatttcagccgaaactggccttcgcaagacatgtagccagataagtctatgacttggatggacttctagttgaaattgtgtcttcgcaaatagcaggctggcctgttcaaaagaataacggcccacaaagcatagttccatccagttattatttcaatataggtaatatgatgaaagaccgaagctcactgtccttctccgccaccgcccgcggacatgctgaggaacatgaggattggaataacccaccagtacctagtttattgattagcgcacgaaagcaacgatagaagtatctgtaacctacttctgcaaaatagacttttcttcaggttgctctgggttttggccatcgggcccaacaatcactggcctgttcaggtgaggctgcgtcccggattcgttcgagacaagttcaatttgaggactcgatgttgagccctgagcgctagtagatgcagacagggagacagtgtagacttcgttggttgggccgagatgaagacgaaacgttggttgctcactggccgttaaagaggacaacgacacgagactgccaacccattgctttttgtttggggaggttgaagtgtagagaccaacacgcacgagattatcgcgctggtcatcttttggggggtgatatgagaccacgtccgatttcaatgaggttgggtcgtaggagatgctcgcgaggacggacggttgtggcgactctaagggccaatacaggatgtcggtcgagaaggaggcattggcgacagaaattaggagtaacacagcgctaaagatggtggataggaacctcatggcgaagaagtgaattatagtgaggagacaacctgagatgtcaacggtttggagaagaaagtccgagctccaaccccacgagtacataagctgtacataagctgtacataactatacatgactatacataactagtcatacagatgaatcccttacgatccttgctatatacatattcgaaattcaaagactaataaaatatatatatacgatatgtatacacgtaaatgttcttgtaaaaacataacataaaataggtaaatatcataattttacacttacctacttatatggtacatgaagagtacatcaatcaccgtataaaatagcgggacattcaagtattggtagagtgccccgaaagtgcaggtaccggctagtactgttccgtcagggcggcaaattaatgtggtcgtaagttcttctcctcacagttcaccttcaattctcttaattcaatatccacagatataaacagtaagtctgcttcgaccagtctatattccgtgttttgcgactcgctaatccatggttagtagcaatctatagctccatagctgtcaactcgaaagggaagagctactacggtaacatggcctcgcggaaggcatccaatgaccctcgggaggatctggcagttcatgtcgaccactatattggcattgatgtcggaactggcagtgcccgtgcctgtatcatcgacgacaaaggtgatattgtggggttggcctcagagaatatcggtctttggcaaccagagcacggtttctatgtgagtgcaactccaaggaatttgagtgccaaatcagtcttacctagcctctaggaacaatctacctccgatatctggcgttgcatttgtgtcgctgttcagcgcgttattagccagcacaatatcaatcctgacacggttcggggtatcgggtttgacgctacctgctccttgtcggttttctccaatgataccgacgagccgatctctgtaacgggccccaatttcgactcggaccgcaacgtgatcttgtggctggatcatcgcccagttgaggaagccgcgaagatcaatgctaccaaccacaacctactccgctatgtgggcggaaagatgtctattgaaatggagattcccaaggttctttggctcaaaaaccacatgcctaaggagctctttggcagatgcaagttctatgatctgggagatgctcttacacacattgctacgggcaatgagaagcgaagcttctgcagcgtagtctgcaagcagggatacgtgcctgttggtgtcgatgggagtgtcaagggatggcaagaagatttcttgcaggacattggcctgggtgacttgaccgaagataatttcaagcgtatgggcggagttgacggggtggtgagcctttccctaaatgacgatggcgcagtttactgacttttggtgccacacagaatggtgattatttaagtgccggtgaattggttggcactctctgcgatagggctgcagccgaattaggcctgccggctggtattgccattggcagtagtgtgatcgacgcctacgctggctggatcggtaccgtcggatccaaattcgacatgcacccaggccaatctagcgcagatgtccctaaacttgatatatcggaggccttctctcgcctcgcagctgtcgcgggaacctcaacatgtcaccttgccatgtcaccagacccggtttttgttgatggtgtctggggaccatatcgggataccattcttcccggatactggatggctgagggtggccaatctgccacaggagaattgctcaagcatgtaattgagactcacccggcattcaaccaggctatttcgattgccgagtcatcccatgccaacatctacgactacctggataagcatctcaaggagatggcacaagcccgaggagccccatgtgtatcctatctcggacgccacttcttcttctatggtgcgtctgtcttcattgttagcattgtttaggttctggctgatttcgttgatgaattggggtttaggtgacctatggggaaacagatctccccttggcgatcctaacatgactggatccgtctttggcctaaccagtgataaatctgtggatggccttgccatttactactacgccaccatggagttcattgcgctgcaaactaagcagattgtagaaacaatgaacaaggcaggtcaccacatcacctctgtgttcatgtcgggctcacaatgccagaatgacatcctggtcaacctcatcgcatctgcctgcgatatgcctgtgctgattcccgagtacatccatgctgcggtatgccacggcgctgctatgctcggcgccaaggccgccagcgctgattcccagggcagaacccttgatctgtgggatatcatgaatcggatgagtaagcgttgcaagcaggtgttgccgacagaggataagaacgagaaagccttgctcggcgtgaagtatgaggtctttctagaacagtgctggaaacaacgaaaataccgtgggatggtggatgacgccgtgggggcctggaagtccaagtccacctaatttgatatcacgatcacgtcggttactctcttttcaatcacaaaaacgagaagatatggatactggagtgttagttcacgatttacaaatcgggtatacttgacatcagtcattaccgcatactaaaaagtatgacaatttcgaaatcataacataattattgcaaaatcatgcccaatgcatcgagctacagagcctatgtcatgaggaaagtcaagaacatgagtcacacactccatataaacgtcaagcatataaacaaaatcccgaaaaaacattaattcagacaagccaatgaatgccttgtgctgaaaagcaactatcactatgcaatatgtgcactttgtctagtaggccaccccgcctcttgttcggccaacagtgtagaacttgttggaactactggtgctgcctatggctagggtatcaaagcgatccacgcccatactgtccatattcacatagcctgacatatggaagccaagcacaacgacgaggtaggtgagtacaaggatggatcccttaaagtagttgctctttccttcgccgtatacatgcgagagaaggaagacgcacataataacggtaatcatatcccactgcgggaatattaggctgttgaaatattttgttagccacagcatttcgattggagacataatgaaaaaaaaaaaagaaaagaaaacgaaaaagctatcttacttgaatgagtggctgacaagctcagatgggtctagcgagcggccatagaaagcgctgaagaataccacagcaggaatctgcaatagacagacctgtagtgcataggcagacccaatttccatagataatgcaatgtttccgttcatggcaaatgagatggcgttctgttaggtgtgttagctaagaatatcaaatgcaaaatcacctcagatagggccttcaatgaccaacgtactaggaactccgtcgtatttggcaccaacgcgaaaagagtaatgccgaggaatttctcatcaatatccacgctctctagcacaacatcaaccgtgttgacaagaatttcagcaatcactgcatagaggacagttgccccaagaagaatgacagagcttttaactttgctccaattaggtgcatcatgtcctccgctagaatgagtgggctccacactcaacccgagatcttcaagctcttccccaggtgtatttcgtgatcgctccggagcagggcggctagattgacgaacagaggcttgatggtgttgtacattgggcttgcgacttcgagccgtatcccgagcagccactgttgctgctgttgctgctacttcggtgaactggcgtactagacgctcgttgtcttcttgggccatattacggacaaactttggcacagggtaaccgtcctcgccgctaggattggggggcaccaagtgtgggaaattgcccctgaggtctgcggcttcacttccagccccttcccaattgccagagtcattgtcctccaagccaagatgcttcaatgactggcctaagattcgcttatacagctgagattcacggatcgaatctttggacccagaagcggcaccagaagcttcgggctggccatttgggaacatgtgccgtggctcgtagaatgattcttgggcagattgggtggcatgggcatgggcatggggatgggaattctttttttcttccatctctgatgcccagataagagcagcgtgggtcctaagagtaaaccataggccgatgccgtatgaaaggaacaagaaaacagcggcgatccatgcatatggctgtaccgctttttgaaagaattgatcatcgacagccgctgtttgtgagaaatagcagcgcctgcaatctcgagtctctggatcgagggaacttacacacgagtggcagttcagctcatgctatgcaccagtcaacttaggttcgtttgcaaaggaaggtgaaacttacactaccataaacctgatagaagagggtgggaccaaaggcagcaataaccgcaaacaacaacatcgtcgaggtcacaccagctgatttcacattgaaccgttgggtcttgcgtttgagtgcaccaaagcacatggacaaaccagggaggaataaaatgccgacaaagatactgccgatgatacttccctcgacaagctgagccttgccctcagtcaaagcgacacagtagagatatacttctacgatagttgagaagaaagcattgatggcagcacctaagcccatagaagattgagcggagatcgaggcgacggcttgtccaatgaaataggccagaggaataatggagagcaacgcgagagggaagatcaaggccggatgtgtgagccaattctgcaagcctaagaatttgcccaaaacatggtagtcgaaaatcacaaacacaaccacgccaagaagattgatcaaaaagatgttcgttccatcgagagtgtacttccagtacctcgttccagcagctctgtaggtacaaagaagtatggaagacgaagatgtggttgtgctcgatctagcatatctggaatcggaatggaaggacagtgctagcggatgtctgcgcaaatggctcacgagtgtaatcgttatacgacccatgggaatccaaaacaccaagagccagcagacgagcgataccataagcatcagcggaccaactaggaagtagaagaacacgaagaacacgacgcgacccaaggtccattcgccccgcccaaagaggcgacgcttggattgagcgagctgagaggactcttcgcgttgtccacgctggggtcgcccgagcaggctgtcttgttcaccggctgaatcgacgctgtttcttcgtctaccgaccagggaccgatctctgcgagggccgaagaaaagacggccatgttccaggtcgccattctgccattgttcatattcgctgatactgcgtccctcgccttcatcttcctcggcataattctcctcggtctccagaagaacatatgatccgaacgggtataacagatatcgtgaaagacctgcaaatactcttccgtatgccacagcactggatgagtaggaaaaaaaaaagcaagcaactgcggctaacagagcgaaaagggcaagccaccatccaaaaaacaaagaccatagtagattggtcaaaaaaagcatgggactgacatagcctcctggagaagagtggatatcaccctcggccgttttctctacagaacggcttttcttgtacaacgcaggcttccagagtctgataccaaacgggtgtgtttggttgatggcctgttgacggtctttgagtgtgaagctctcagcatcgctggctgcgtcttcatcgtcttctattccaccctcctcctcaccgtcctcactctcccctccactggtatgtccggtttgtttcaacgaaggaaactcttcttcataatccagacctgcttcaggtaaggccgtttcgtctgcgttgtaaccctccgaatcggctcttgccaagggtctgggacgagcactgggacgtcgtctcaaggtcgagctttgcgttcgtagtgggcgaatcctgggtgattgttgcgggttcgcgccttgcttcatcgtcatatattgcttgacctcattgacatcatcatctgtcgagaacccttgccctctgtgggggattggacgtttggaagacatgcgacgcgataccgagggctttcggggcttatcagggacagtagaagattgagtcgtgaatgcgcgagtcaaactctcgtcttggccatcatcatttagttcaggattggtcgcctcggaggaggatggatcgagtgtacctgcaattttggatcaacccaagccgtcattgttgtaggttacaccaaaggcaagcttaccgtatgttctccgcgcggaggcagaggatctgattggaggcacagcttcaggagttggtgtttccattcccgccatcgcagatggctgcgtggactcgggagagccagggtttcctttatcgccagccatgacccagtgatttgacaagcacacagtgaaccttggaggcacaagaaacgagtaagagagataaattcaaaaagacacggggtctcttctctcttttatgctgtctttgttatccccagagaaagagacagaaaaaagtcaaagcgataagaccggagttcccagtgacattattgaaccaaagagatctaggtgaaacgcagaaatcgagaatgtcaatgaaagcttcattagagatgcatataagtcattgcagtatcagggaggacgaaactcgtggaaaagagtatgccgaaggggagaaatggctctttgaccgttgccttctcttgcagatgacccggtcatcagcccacctaagcagctccaaggcttgaccgcccaataagatccacagctgactcattgggcggggagctcccgaagtctcatccatggaaacaaagcaggatgtttgactggtttgtcttaaataattagcctgatatttcaggattgaattcctttttgttaactagttaacttaactaactaatctcttagtcagcacaactgaacgggcactgggcctgagcttcgcgtacagctggactgctctgctcgccaaaccccagcttcaacttatccgtttctgtttccgagctacatcccctcctctgacgaattctcaatacaccatcgtctgagcagaaagataaaggcttttttttcttcactgcaactgtgttctgtggaagacagacagcccttgactctccatagcgtcatcatcccattcgccatcatggctttagacaactactatcgcaacaaaatcgagggcatgaagcttgagattatccaaggccaggctgttctacgacgattagaagcgcagcgcaatgactacaactcgagagtccgtctactgcgcgaagagcttggcttgttgcaacaacccggctcttacgttggcgaggtggtgaaggtgatgagcaccaagaaggtcttggtgaaggtacacccagaaggaaaatacggtaggcttcgtccattctatcttggctttcaatgaccgggcttatgctaacggtatggttttctttcatcgcagtggtggatatctccgatggtgtggacattagcaaactcgttgtgggcaagcgggttgctctactgtctgactcgtacaagctggagaagatgttgccgtcctcggtcgatcctctggttgcgctcatgatggtcgagaaggtccccgacagcacttacgacatgattggtggcctagaccagcaaatcaaggaaatcaaagaagtgatcgagcttggcctcaagcaccccgagctcttcgaatccctgggtatcgcacagccgaagggtgtcttgctctacggcccacctggaaccggcaagaccctgcttgctcgagcagccgctcaccataccgactgtcgattcatccgagtgagtggttcagaactggtgcagaaatacatcggagagggtagtcggatggtacgtgagcttttcgtcatggcacgagagcacgcaccaagtatcatctttatggatgagattgacagtattggatcaagtcggatagattcatcaggaggcggtgactcggaagtgcaacgtaccatgttggagttgttgaatcagttggacggcttcgagccaacgaagaacattaagattatcatggcgacaaatcgactggatattctcgacccggccctacttcggcctgggcgaattgatcgaaagatcgagttcccccctccatcgtcagtctttccctcccctcgcccctactccgccccagttatttatggcttgttctttttttttttttctctttttcattcctttggccttgagcacgatgctaacttaactcttctttagggtcgaagcccgtgccgacatcttgcgaattcactctcggtcgatgaacctgacccgtggaatcaacctggccaagattgccgaaaagatgaacgggtgctctggagccgagctcaagggtgtctgcacagaggcaggcatgtatgcactccgcgaacgtcgggttcatgtcacacaagaggacttcgacttggccactgccaagattctgaacaagcacgatgacaaggaggtggccgtgtcgaagctgtggaaatagaggcctctccaaagcggggggtggatcccgggggcctgggaaacgatcgacgacattgtatcactagttctaatcctaccctgataattcagaccccaagtgaatccatagttgtgcgacatgtctggatccgacctatttcgggtgatgtgtaaaggtgtaactatcccttggcaaccttttcgggggcgactgcctgcttggcctcggtgcataccctccgtccacatacatgtagtagaacagccatctatctcgtactggatatggggtcggtctgatgtgcaaggagaccccggaagtagatctacgtaacgttgattggttattttcccgactggcgaaggaaaaggaggcttggcagcttcagtctatctaaaatggcacctgaaggcagtggcttactttgtaccagtacggagatgtggtacaccatgcctccttgagtgaaggcttggcatattgctgcggaccgtgtagatcagagatatctcaattggccttggcgcggtattcagggatctctgactattgtcttggcagtttaaaccccatcttcggtatatgtgggaatgtccacaccgagcgtagtagtatacatcgggtaatatcgactattaaaatcattggacgcatttctccccttgccggtttagactgacgcggaattgcgcgtgaccaaccggcggatcaacgcctgggctagcgccaaggtattttccaacctgggaaggttggactgctgaggtaaccccccttgtcctagataccggatccacttaggttcaccccatactttgatgaagtatccaggactacttcttgtgaacccgcccttgcgcagccaagacatgattgtaggttagaatagtctgaatagagagaatcctggagtgagattgtacccttggatgttttatatacatgaataactctgtatttctgaatttggttctgacaaagtcattgaccgagagtccgtttacggtttggttcgggcgttatctctttactcaattgaattagaatataaatcttgcaactaaccagaactggttagtccactaactaagataggtcaattatatattaatatttccaaaaaaagcaatcttcctcctctccacgtctccacatctccacaactccattggctctatacttctccgtactcttatgtactttgtacttggtatttctttggtttttcggtttttcttttccctttttcaatatttgactcaggaatgatcagacaactccacgattgtatttatccgaatccccggttcatttaaactatttccattccccccttcttccccaccttttctatactttcctaagcttgactttgaaatttccattcgcctagcactataattcaaccggactatgtccgatctgtggtattctatagcctttgccattgaccctaagagaacggaagccatgcctgccgtcttacagtcaacaatcaatttgctggaaagtgagctggtcaaagcccgcgctgccctccgggatatccaacccaatgcttcaccctttggattccggagtgatgaagtcgcggtaggcgccatgactgcctacagacgggatctcatcggccgcgcccccgatttttacggatctcgccgcttgacgctgaaggaactcggcctggagcccgtcgtacgcgaactacccaccgaacgagtggtaccaagggtgcaatgtataacacccgcaccgcctcatcgaacaggactagaggatgtcctgagcaatagcttaatcctcgaccacatggcaccatatctatcagtgtcctcgttgatgacgctgtgctcaacttcgcgccgcctacacaccatgatcactcagacaccatatgtattccggcatctcgatctgtcccactgtcggggcgcagaactctctacagtaacacaagcggagaacgactctcagacggaggacgagatctactccgctccagtgaagaatatctttacgagccttgagcgcagaggtatactgcaagatgtgcgcactctcatcttggacggggtgtcagtgccggctgacctggtggccgatatcattctgacggatcgctttaacgtcaacatcctgtctatccgcgaatgtcgccatctcaacgaacgcaagctcatgcaggtccttcagcatgccgttcggcctacacgtcctgccggtatgccacgagtgaagggaatctaccatttttctcccatgcatacgggacctcgggcagtgacacgaccccgataccgtaactcgtggggaacccgtgtgggaactttgcggacatccagccaaatcccatctaactccgatcaggaggatgaggtctccgcagaatcctcgatagagcagcaacacgagtggtatagcgcatcggggaagctattcaagcacactcctgaggaaggctgggcccaagtacttaaaaaatgtgagggcatcattgcctttgatgctgctctttgtcgtggcccgagacacgatctcaatctatacagttcgaccacggaggcgggcaccccagctgcggttccattgctcggacccgccgtggccaccgtagccctcggaccccgtgggtgtgacggatgccacagttcccccgaaggtccgtctatttggagccagtccccagatattcaatttccattgcttggccccccgccattgcattcatctagcgttgccatggcgaaacggcccgagctaattccaggagagcatccggttctcattgcccgctgcacagactgcctcaccaactgttggtgccaccggtgcaataaatggttctgtgaaaactgtctaccaaacccgcagcgcgttcgagtaagcctatccccgcatcagactgcagtccacgccagtgccgctgagctgcaagaacgtgaggtgtgttgatattgaatcttccctgctaatcgtccatatcactgattcttgtcatgcagagattggaacgaggtgtaagcaaagactgctgggaatgtggcccaactgtgagtaactccccggatctaggatgtcacttttttttctgaccatagtagtgtgcttcctgtaagctggaatgccagcacacgtgccaaggctgccagggcgattattgcattcagcacaatgaaggatgctcgaagacactggtacgtagtaaccgaaggccctataattgcatgagagcgtatactaaccttgtcccagtgtgactggtgcaataccagtgctcgcggtcgaatgcgtggcgacttctactaaatttaatttcgtgattttaaatatattggtaatcgacacgtcgaattatcgcgtatgtacggagtacgttgacctgattttcaagcgaactatgaagcgtggaggcttccagaattgaaactcttatctcttatcggctgtgcagaccgcaatagtgacagattttggcagaacttggcttttctcgggcagaattgtagatatatatatatatatacttgaggttgaagataaatacaaagccttgaaacccgtgatttgtatgattcattaagaaaacatacagaagagaggtaatatctatctctatacagtaggcggagagaaaagcggtggtcctaaagtattagaattgacttttgccaccttcgccgctattgcggtccgtttccgccgcattggaatattcatataaaggatgcatcccctctctaatgattgtcaaattctatcatggcccaagatactctagcctggtcatcccagcttttcgtcgcacctccagagcgggcgcctcggctaactggcgacaaaatcactctaccgcaatctgcgcttgaacagctactggctgccgctccgctccaagctgtcccctcagggaattctcgtgtacttacttcgtcatttgaccctttcaatcaccataccctcgccgtcgaatcgcgcgcccgtcaagcggccgagcaacatcagcagcaactcccccacccgttaatcttccgcattgtcaatcctctgaatgggcggttcatctatgcgggcattcgggagttctccgcagaagagaatgaagtcgtactgagtacattgctcagagacgcacttgatatcaaggatgaagagtccttgagcgaaaatggcggatcacaagacctagcggtgcaaatagaaagggaaccctcaccacggactggccccgcggtcacagtacacgcgaagcaactacccaagggcacctatgttcgcctccgtccgctagaggctggatatgatccagaagactggaaggctcttctggaaagatacttacgggataactttacaactctcacgacgggcgaacttctgacggtgccgggtacccggagcgagtcattcagatttttggtggataaagtgtttcccgaaggcgaaggaatatgcgtggtggacacggatcttgaagttgacatcgtcgcattgtcagaggaacaggcccgagaaacactacagaagagattggaaaagtcctcacgcgcgccaggcacaactagtggcagttcgatcggcggtatcctcagcattggggaagatgtcactgcccaagtattgcctggggaatatgtggattatgagcttcgagattggaatcgccaggatactatccagattgagcttactacggacaacccgggattgagtcttttcgctagtcccttttctactcgccaaagaagccgtcctagatcagatatgcatgtcttgggggacttctcgacccagtcgcccaagaaattcgatctccggcctacgaacatggttctagaagacgccgaggctctctatatagcagtccacgctgatcctgcggatcagagtgaatcatctgatccacagcggcagtcaccgtcgcaatatcacctgcggatcagagtgaatccttttgattctttggtcagtcataatgggacggaagagtcccacgagcctggcgatgtgcagtgcaagaactgccagcaatgggttcctggacggacactacttctccacgagaacttctgtctccgcaataacatattatgcccgcagtgccagaacgtctttcaaaagcgatctttagagtggcaaggccactggcactgtccacacgactctggttatggcaatgatgccccaagcaaagaaaaacatgacgctatcttccaccaaacacacaaatgcatcgactgtgctggggattttgagggacttcctagtcttgcgcaacatcgtactacagattgtcctgggaagttgattctttgtcaattctgccatcttctcgtgccacagaaagccgattctgaccctgatttacacgaccccgaggtgatgctctccggccttactccacacgaactggtggatggaggacgcaccaccgagtgccacctgtgtaataagattatccgattacgtgacatgaacacccatcttcgccaccatgacttggagcgcctttctcgacccgcaccgcgcatgtgcatgaacaaaaactgcggcaggacattgaataaagccggaaatgagtctgttgggctgtgcaatttctgtttcggaccgctgtatgtggatacgcacgacccagagggcaaagcattacgtcgtcgcattgaacgccgatatctctcccaaatgatgaccggatgtggcaagccctggtgtcaaaatgagtattgcaaaacggcaaagcagaaagcggcatctgactctggtcctccagccgcgatgagtgtggtggaaattatgaagttgacacgcccacttgtcgaagctctcaacacccagccggatgtgcctaacatgtcgcttttgtacctctgtgctgatgaaacaagtcaacaccgtcgcaatcttgcagaattgattgcagcagagagcgttgaagggaatgacaaagtctatgatctaccatggtgtattgcagcagccgaagccgcgggtggcgacttggaaaaggcgagagagtggctgtctaagtgggcaccaaatcagggcgcaacgagtacatgatccgtctagttgttgatttagacttgattgggtatgagaatatgggcttggttgatcaagttgagcagatacaaggatttaataatgcataatgaatgatatataaacacagctagaattccataatattcatgattaaaatgcaaaggctggtctagaattgagatcatagacatcgcagccactagcctaaaggaccatacatgcaacgcatagacagagaacatgtatcaatcgaaacccaaccctttcaagctgcacctgtcttcgcggcgagcgagccggtgccgcgcgaagagaagatacccataattccaaaaacgacatagaacagagccaatggatacgccacgagacccctcatgccactcatacgcgccacagcgcaaaacattcccgatgaactgtatgtacaccagccaacagcggcaacggtcaggagatagccgaacatggtatccatgggaatcatgatgccaatgagactggtaagcaccaaaggaaggaagcagtagcccaacacgctagcggagcgcgggaaggtcagagtagcagagaaatggcccgcggccgaggcaccagacatggagggtttgtggtggggattgtagttggtagggtcggcggcgtttggagttggagcggtgtcgagagcgggagacatgaggctgaggatcagatgcaaagcgacggtaccgaaaacggcgacgccgtagatatagccgtagaataccttgcctgagaggaggaggaaagtgccgtacaagacgatgtagagcagagctccgtagagatcgctatcatccataaggtgattatcgatagaggcgaagggattcagaacagtcagtgtctagacaatgaaaccgttagcacccaatatcgggcattcacattgaccagaactacaattaaattaaacccggggtaaaaaaacaagccacccgcaagaccgggaccccgcgtctcctgaaagcgcctgatataagaatcaaccaagactaaccttggtccggatatgttcaaagttgacacccaactcctcaagcaacggcggttcaccatcatacccctccgtcccaaatgcagctaaccagcccgtccttaagccgccctgttcgcccatccgtccactaacgccagcggctgcggacccgaatcccccatacccactaccggcagggtaagcttgtgtggagggattgggagctccaccaaagccggcaccatatgatgcttgtgatggggttgtgtgaccggaaaccgaggagtaggacgaggggaagaactggagattctgtggtgcggagccctgaggggcgtagccctgctgttgtggatagtattgggccatgaccacgactgacggcgtgaagagcgaaaggtggctagtttctgttcgagtgtaggacgtgcttgggatatctggagagtagcgacaggttaatgtgtggattgttgtagagcttcgaagctccaaatggcctcaataatgttggatgactaagcgactagtcgcccgcggcccagggcccagggcccagtgtaaatgtagggtagagaaatgtctttctttctggatttagaatgtccaacgtttatctgaatttgattggaattggtaaagcaatgtgaaaggtatggttgaatctgcggaaaatctacttggtaatgtttacaggaaattgataccgatgcccagctggagccctttgcggccttcttcaccctttcgcaatgccagaggtaaggaaaagttaagctcgaagcgagcgacaggatgagcgtaaacgataccgaagccagctgcgacactgggcagtccgctttgtagttcagagagtgttgagaccagagcatcctgcacctcaccattagtagtaggagtggctttctgtgaagtctgcagagaaagcaagcggccaccgttcaagaacgcctggaaccgcacgggcttctcagccccaagtcggggaagcgggaacagcagattggcgcttccggcggcgtacacatcaccgcctagggaatcaacgccttcacgaggaccgagaccgcagaggcggaatccacggacgtcagtaggtcctccaagctggaagcggtcattgacacgggacagttgagggcgagggttggactctagtccaagagggtagataagaccagcacggaatccggtggtgaggctaacgccgctgtcacccttaattcctgggatgggaatagggatggcaccttgtgtctcaatttccgacttccagaaagatacatcgcccttcagcgggccaaatccagccagctcattgaaggccttggcatagtacccacgagatggcagcaaggcattgtcccgctggtcgttaacccagctatggaagatgctgctcttcacgctgtcacctgcatctgcgcggacagtaggtgaggcgttctccgcaaggccagtgagctgtctccagaaaccggtgtatccaaattcgtgatggtggcctgatttggacatccatcggagcttactccaaccacccttgagaacctcctcgtgactcgcccaagacttctgtgtggaacttgcaataccgccaatttctaggcggaaatcgggatcacctaagatcggggtctcgaatgcagcctggtaagcggaccgtgtccgggtaccgagcgaagcgttcaaatttaaagtctcggcaccaccaaagacattgcgccagagaagattaccgtaggctgaaccttcagcattgcccaagtctgttccagtcttcatcagcacacgggacttctctcgcgtcgccagatggacatcgatgttgcgcatgccattttggccttgcgactcatccaagtagaccgaaataggctggtggaatagatctgagatgatgttagtagatacccatcatcattgctattatcccatcgtctcataccgaaacgtccaagtttatctgcggtagccgacacttcccgcaacgcctcagacagtgtatagggccgacccttgtttgcactcaaaagggggctcaagttgcgctcaaggaagcttcgtctggtatgaggagcactggtgacttgaacagaagagatggtgcagggcagggtcgaattttcgtcgatctaataaatattgcgatcagccgggaactccgcaagtaaacgcgaattggctgtcatcggcttctagatgtgaagaccataccaattcagcgagtcgatcctgagccttttggtaaatggcttgcatgcgctcattcacggcctgctgttgctcttccaacaccttagggtctgctcgctgttgcaaacgttcgaagatctagaagcggatagaagtcaatagagggtcaactgagcatttaggcagttcatgagctgcctaaggtatgcactgacgctatcatctccggcagcaaaagaggaagacatttttgcggctgcaatggccagaactttcggcctccggggaatagatcgggggtgcgtgccaaacccgcaagatatggaaccagcacgtgacctggcgaacgtgagcgcctgattgcgacaatctatcttctgactccgcaacttctttcactgttcattttatttcctgggactcgctttcccagtactcataaacaccgacttgtcttattctacttcgcaaactttattgcttctgctatcgcttctgctccaatcactaaagatggcgacaaaagcggctttcaaacgggtaagtggccagacctaaggtcaatcggttatccgtgaatcgtgtctaattattatagctcactcgtgaataccaaaatatccaaaaagatcccacgccatatattgtgacccacccatctgagactaatatccttgagtaagtgatatacaccccctcgagctaccgcagaacctcgaagctaacctgctccagatggcattatatcctcactggacctccggggactccttatgaaaacggacagtactggggtacactgatattccctccagagtacccattcgctccccccgccattcgcatgcacacacccagtggtcgattccagccttccactcgactctgtctaagcattagtgatttccacccgaaatcattcaaccccgcctgggaagtttcgactattctcatcggtcttctctctttcatgaccagtgaagaaatgaccacaggaagtgtcagtggttcggaaagtgagcgcagagtgcttgccgcacgatctcggtggtggaactcgaccggaggaggttctcatgtcagcgccactgccggtgtcactcgaacttccaaaggtatcaacaatgtcaaggcgggagatggaggcttaaagttccgcacagaatggaccgaactcgaccaggaaaattgggcttggatgaaagagcatcgcatcgattctgccaccggtcagattttaccggatcccgacgcgcccaccaagtgttctccagagacaagtgctttacgtcgacgtcccaacggtagtgctcctggaattggttccgtcgtggatggtggaaatgtcgcgagagaggctggtcaaggctgggccagacgaaaccgaatctggatatgtgttgctgtcttctttggctatgcgttgatctcgcgactattgagtgatatgcgagtatgagactgaaatagtttcttcatgttgaataccctttcctttgtcttcatgtcttatcctcgcctttccttctttgtccttagcgggttgcaagcattatttgggcgtcatggggttttttttctcagattctccaagattctccaagtccaagacaataaagtccaattattgaatacccgaagaccatttgattccgagtatataggttacaccgttgagcaccggatcatcccagacgagcgctgagttgggcttgtgctcgcccccgcattggcaacgtaactacgctccttttctcttctaaatccgccttcatccaactgcatagcctgttatccacttcgttattggtttgtcttctgtgttttacctcttttttctttgcattccgaacttggctcttcggatggatcatctgcagcctttcacctttggttctacccattcaggtcagtgcatctctagttgatatacctgatattagggaatctggccttattgaactctgaatcccgttcgcttctttttgcctctgttgcctcgtttgcctccttcgaggtcaacttcccgtcaattttgagtgatattgctctttgtttcctatttgtctggttatggacttccccatcagtcagcagtgttagagttgcagcaaagagatccccctcgatcatcaagagcttggactgaaatccccccactagaacccaaggctaaacctgcgccgctggatcggccttcttttacattcatcgatcacgacgatgacttgacctccaaaaggattaaagatgtcaatgcacgcaaggctattcgttcccatgttatgcgcgatgtacgccgacgggagagacttgctgggttgaagcgaacatccagacagaatcgcgggcaatccaatgcttccaaggctaccattaatgaatcagatgaacaaagactggtgctgagggcttcatctcagtcctccgcttcgtcttccatactggatacagactccggagacggttttacgtcaatttaccgtgggcgtcctgtcaggtggtgtgctggttatcctttgcctctccattcaaatcccaacccacctacatcatggtttcttgatcctttctttacgttgcccggtactagtgagcttccttcgatggttgcacacttggtgtactactgtaagtattactcattcaaccttgtctatcctagtcgttctaggtgttcataccgcatgagcctccccagaactagagctgaccacatggcgaagggaaaaccatattcgtaccgatgacttttccgaacacgagcaaagattcaaagcaagagatggaactaatggttagatcctcattctctgacccgggaagtttctttgggctgatgagcatgtgcgctgcacatcgagccgttctcgcgagccagcgatcgggcaattgggactcggtgcttaccaacgaccctgactattgtatgatgagagcaaagtccattcaagagatgagcgcaaaagtacgggatccgaatcgcagactcagcaatgaggcatttgataccatagtcaacctcctcactggctcggtatggattctattcgtgacttcggattgcagtgttgctaacagtccacagctaattatcggagagttcagcgaggtccatactcacctaacagggcttaaaagtatggtcgacctgcggggtggaataacagatgagagtatccgttcctcctctatgttgtctgccatcatcacgtacgtgtgttttcggtccacctctttactaagctccgctcacggttgatgaaatagaaccgacatcaaagccgcgtcaggattgatgaccaaacctgttttcccattgacttgggatgcacagccaattccttcggagatccaacagcgaatcagaccactggcttcgtcccctctcaacagactaggcacgggattttctgtcaacacgtttctcagtcctcccttactgaaaattataagtgtgcttcgtgacatggtattctttagcatcacctatcagacaaatcccacggtcatcaaacctggcgaccaagactttttccgcatcctcaactgcgaaacagagcatcaacttctcagctatatctatgcagaaggttcccccaacccggagcccaatcttcatccgatcgaagcagtcactcgagtggctgctatttgttatctcaatcattttctgattgtctcgccttcatcatctggattgggtcgagcccttacgaaacacctcaaaacagcgttggatagctgcaaattgtctcttcttgtaggactgccaaagcaaaacttcggactgtacgtttgggcattatttatcggagcccaaggtgcccttggacagcctgagagacaatggtttgtggagcggctagcccgtgtcgcaatgatatgtggatggcagtcgtgggagcaaatttcaaaacttatggccgaatttttcttcgttacagctttggacagcttgaattggcgctctatctgggatgaagcaatgactggatttgtgatatccgagtcggaggaactggaattctcgtctcttcttggaacgggtgcactctcccttacttagctctcaattatgagcgcttgtatattttgcgctgcataatcaacatcaagtgtaataataaaccgaaagaaataacagaaagaaagtccgtgaagtagatatataaagatgaagtataaaattcaccgttttagactcggcctatcacgtggcacctttatgtcatcaaaaaagtccgctttctccggtcttttatcgcttttgctttcgtcttgaattttaccattcaatttcgttgcttcatacttcaaaatgggttggttctgggcagatactccgcaagctcctgcagtctcgatcccacatgcatcctcaaacgcatctcctccggttcgtttcccgcatactgtacagctttgatcatttagactgactcttatctaaagccgggatgcccgatgcatgaatccggctcgaagccctcagcctcgccagcacctgctgctgaactccctagcagctgccccatgaaatcgaaagactctccattctactctgctccaaaatcaacaccggcgcaaacaccgcagccacccgacaccgcggcgcagccctcaaccctttcgaagctcaatcctttgaactacatgttctcgtctatctctcaagagcgcgccgccaatcaaactgttgaccttcccgttgagcgcgaaggctcatcaattccaagaggcgacggcgaaggtaactgggagtatccgtctccgcaacaaatgtacaacgctatgttgcgcaaaggacacacagatacaccccaggatgcggtggagtcgatggttgcagtgcacaacttcctgaacgaaggtgcctgggacgaaatcgtgggatgggagcgcgtattcgccaagggactcaagtctggatgggagcactgccgccgcggcgaggaaaacctgagcatggacctgacctatgcagacgagaatggtaaattcgattcgacccccgagcctcgtctgctccggttccagggtcggccgcaagagtggtcaccgaaggcacagatataccagatactgagctgggcgtacccaagcaagtttcagtaaggactgtcctcgcgatatttacaataggcaaaattctgactccacttccaacaggacaagccctccatttgaccgtcacgattggtatgtcgtccgccagacaccttcaggcccgaaggaagttcgatacgtgatcgattactactctggggatccagatcctcacggactgcctgtcttccaccttgatatccgccctgcgttagatacaccgaccgccgctgttgagcgcctaatgaggtggggaggtgacgtctggtggagggctagcggtgcagctgttcgtgaacagacctcgcgctaagagtgtttgacagctgcaacaaccaggctgtctgcttctccactccactctgtaattattcaaaggcatggcgctggcgttccattgtttatcttcgcttgtccttgtacgatgtttatcttccctcttgtgttatatcgcaacctccgttagtctttggaaatagacacatgataatgatatctttgcattaattttacttccgcttccccaaagatcagaagtttcacgttttggtagcagatttctttaaaaaaaagtaagtgtatttctctaaaatccaccgagtatggctgcgctttcatcattcaacgggcatcccatctaagctttcatatcaacagtgaagaattgggtgtgtatggtacaaaataagaacggtggatggtcttatatattaggggaaagttggtcgtacttgacgcaatgctcaacactctcgatgctggcctgcagcattccacgagcctccaggccgacccaaacccagagcattgagtagtcgcccgagcgcacagtttccaagaatgaacggccagaccccaattgtcgtagaataggaagtgcactagacaaagtcagcttcagttgaacaagtagaaagcctcgtggaagagaaaactcacctcttaaacaggtctagattggggttcaaactacgtcctattccttcaagcagaagacatgaaatgacgacgttgacaaaatctccttcaaaccgaacatggtgtccgcggaccatagtcaatacctcactaaggatatcaccaatcttgacactccccagagcgaaggttcgagacttgatactcagaaccaaatgctgcattttcagtgcaaatacctccgggtcaatgacatcttccggtgttcggcaccgctcgaccataagctgaccagcccggtatccgtcgaattcagcaatagctcgaaagaggtccaggaagttccgtcggttggtctcatttagctgggtgacaagaccagtgtcgataaatatcaactgcggacgatacccctcgtcgttgagctgggaaagagcagccttccagtcctccgggtcattgagatgcggacgtaaccgcttgaggactgcctctgtcacatcaacttcggcccgtgtcggggcatcgaacgcacgcgaatgcttgcgaagggagaggtctagctcgctaggcctgtagaaacgaaccatgatgttccccggatggagatcggcatggataaaattgtctatgagcagcatatgcaaaaatgcatcgaggccttcattagcaatctcgtgctgatatagaccccctccaatatccaagaaggtggccaacggaatgccctgggcaaattcctcaaccaacacctcacgggtggtgtattctaagtatgggtatgggaaccaagcagtagtgcgagaattgaacttctggcggaatatgacgagattggcggcttcaattcgaaggtctagttgtagtttcatcatttcaccaaactgttgtacttcgtcggggaaagaaagccagtgcatcgtggggatgacattgatcatgtgagcaaaaaatgacatgatccgcaggtctctatggatcatttgatcaacactggggtgctgcaccttgatcgcaacatacgatgatggcacccgctgcggggagctcttgactagcacgtcgacattttttcgaaccttctcgcccagtgtttgtggttcgattcccagttcttcttcattggttgcagcaaggttcggtttcaacttcgccttatagacctgtgcaatcgcaccaacgcccagcggttccccctggaactcttcgaatatgtcctcgaatggcagtccgttgaatgctttgcagataatacgcttcgtttggtaaagtgagtgggcgggggcatttgagtgaagtgacgacattatgttgcacatttccggtgggaagatatctgtccgtgaagcagcccattggccgagctattcaagaagtcagcttgtaagttccgtctcaatggacagttattagccaaccaaacgtaccttgataaacgcaggaccggcccgttccattgccttgaccaagaaccgataccaccacaatgtgccagaccgcgcgccatcccggccctgcactttgcgaccaagccagatggcaggcaccgtggcgacgaccggaatgaatatgatggcaaggtgcacgaatcggatccctgtagcaatagggtcatagacatagcaataaaaatagacccatgctgtctgacagagcttcgaaaaaccttgcgcgtcgggtgagaccatcttccgtacctcctcgcgcgaagcctccagcatctgcatttccgcggtcttatcgtggccatcattctctgccgccagtttcaaaaaggccgctggtgccagagtggccatgagcaccccacctattacgggagccctccgcggggtgccttttagttgccgaggccatagcggacgactgaaatattgtcgggggagacgcggaagcccgcgtttgagacagaaacggccgaagagaccggccgccctcatgttatcatgcaggcgtataatattaacatagaatcacgaagttagtagaaaggtcgaggtagaagtaacgagtagccttggagtagaattcctagtcaagatcctggacgataaacaccgtgctgcgacgtcattatatgagcgcgggtagataaaaaggacaaacataacaaacataacaaacatagcaaacaagacaaatcccatcatgtgagcatatacatatcacctgtacagtactcggtacataagttataacctagctaatgataaaagtaaccctaactgctcattgcaggctctagttaatcttctaaagtggtggtcgaaatttgcattctgcaacaacattcctcgtcttttgtccgcttgcaattaaccattgccgaatccggcaatgtccactgcagatcctagctctttatcaaggagaaacagttgaggggtagatcttgctttatagcggtttctattagtgactgctatgattttcatgtcccgaaaacggatcctcgagccctattcaaacggccggaaaaatggtcttgtttgacattaaatcgggccatgatgcccagagatccagagaggctttttcattatcttcagtgtctcaaacgattgccagatggagcgggagttgttgaccatgagtcgtacccagaaccttcgcgatattgagtcgaacaatgagaaaaagcactcgcactggcgcgattgggcctttgtccttctgtggggtgctactggctatgcgtgcatcattttgatggtgttgctctactctaacccgaagcttatacccttcgatatctgttcattgctgtttcgcaaggagatttctccattcttcgcattctcgcaaggaacgggtcattactccaagccccaaggcttcaagatagtcgctctagttcccttccattaccatgggcgtaccgaaatattggactgctatttgcaggtatgcacaatcctgccgctactatattgcttgagtctaacataattcaagaaaaacttggtccataataatggatttcttgatcaggtcatctttgtgccgcagactgatgacgctgtcgacatggaatggctttattcgatcgtgaatcaaacacccgagtatgccatttcttctcgatatcatgagatagaatgggaagttgcaaagaataatgtgatgtacatccgaatcgacggcgatatcgtgttcctggaggacaacgccattccgaccatcgtcaaaacgaaactcgacaatccaagcacgctgatggtatcggccaatgtgataaacgaggcagctctcgcatctctccacagtcatccgggaactgcactcccatatctacctgaattgtacgatgtggaacaaccgtcccgatcaaagcttcaactgaagcacgactggcgagcttcgaatcttccaaactggcagggcccgccgagcttcaaaataagcaaagactttgatccgccatttgaagggcatcgctggctactccccagggatgcgggttctgatcgagatcctatcgcgagatccgtatacaccgacaccggtccaaccctgcatgactggactgttggtgcgcagcaacattactcctttttacaccacctagaacacaatgatttgggccgttacaagttcccgatgtgggtcgatccaaccgagcccaccagcgataattttgggtgcttctggggtaatgatgcagtggatgtgcaccgtattttccgcaacaaccaaaatggatcctcccacaattggcatatgtcggatggctctcgtccgcatatcattatagatggcaaggggcttgtttcacattattctgctcgccaaggtgcggctggtctagacgccacggatctcataactcgttaccgagcatatgcgcaggagaaagtgtgtttgcagactgagtgatctcccgacaactctgggtatcagactgtgtcaattaacggaggaacttacatgtacatatacgtatatacccaacgattttgttcaacttttgcacgtctacaactaggttcttaaaagaagtagattctttttacccgggtgctcatggtacatacaacctctctctccaattaagcatctgttacagccttcagctgtgaggcattgactttcaccaagtcttccagcataccccgataacccacaggaagtgcaccagactattttccggttagcaaatgactagcattattccagggcagaaagctcacgtcgttcgccagcagcccttgcacaagtacaaaagcattgtcacggtctttgatctcttgcgacttgtctgtctcctcggccttatcttgattgggagtgcccccgcctagggtcgtcttgagtaactcggtaacttctgtcttgtgcaggcagtctacaacggcggcacaaccgagtttgtttgtggccattagagctagagcaaaccagccttcactgcgaacgacaggccactgagtctgtgtgatcatcgcacctattggcagcgaaacaccctcgtgcagggtgtacagtctgtcaagcaaggaggttgcttcgtcgtctccatcgcgagccttggggctgacagttcgacagatcgaagcaactgtccgcccaatctcagttttgattggcgtggagtcggttttctcgaaaagagataggagtagagagagataggtccgttggtgagccggggaatcaagatcttgtgagaggggagcaagaaggcgggagatgttatccgtcgaggatataatcacttggcgcgcaatacttgcagccgagaattgaacctgtggaacagattcatatgcccataatcgtgagatggcaggaatgataccagcttctccaagaatggctctattgtcaccggcaattgcaagattcttcaggaaaccaagcgaggagtgcagaaccgctccccgagaatcgctcttgagaacggatatcaattctccgtgtattttcaagtctcggaccattacctggcagacctcgtcggaccgggcgagatttccaagcatgacacaggcacagacctgaagttggtcctcggttgcaaccacccatgacttcaatgtctgtgaaagaggagagtcaagggggtagtattgggcgaaaaatggtgaggctgacacctcagccaaagcctggttaatcttgagacggagctgcgcgagagccttgacgtcttcgttcgaagaagggtccaccacaatcgaaaatgaatggcgcaggacgtccagcaagccttccaccattccattcgacacgcagacattctggaacctttcattttctaggtaagcagcaagagaagtcaccaatgatgaaaaatgtgcaaagtcaagagtatcatcaatggcaagctccatcagaagtacaattgttccgtcgggagagtgttcaatgccctcggctgtaagttatatgttagatcggaagatagaccgaggttaaagataaagtataccttgctctgaggccagctcaatcaaatcgtaggaaaaattgagtagagcctcattgtcttcgatctcgccatctttgatcagcttcaataaaatgtacgctgtccgattggcagctatctggacatgtgctggttctgatatcacattagcgaaacgtgcattatttggctctttctagacatactgtaatccatgcaaatattgtagatgaccggaatggcaacaaaaatcaaatcgggatcgaggaagtagcgaatgatagcaagggtgtagtttcccttgacaacaatttccctattctcatctgcatcaactttagttatctgggcacatatattagtaaattcagcatacctgtatcggcacatgagtttccaataactcgtaaagagtggagtaacaacctggtatcaacttcgcccttcaaagaaactacatccaggaagaagttcaaaacaccagactggccaaatggagcacgccacgaagctgaatcataattagcaatttgtaaaattaagaaatagataggattgacccacgatctctgctaccatccgcaataatctcagtcgcttgaaccaagtattcggagttacaagcccagagcttttgcagggtggcgttcacgctttgtagagtgtcggcatcccgtcgccctcgttttgtgtttgcatcggcctcttcaagagatgcatggagctccttgagatcgaagctatttccagcctcgtcaaccgcctgggccttttcaatgatctcccgcaatccacggaacatctcctgttgctcttccgagccaatggtttccgtgcgtggtggcaaagaagaagaaacctccggtagatctgagagaatctttttgataggaggcaattccaaatccccctttttcgagactgagtggccagcatctccatgaatggccagctgggcggtagatatacccgcgtcagacatgttgccgaatcgagatcagatagttgccttcggggtgtggattaaattggaaggtccgtgttgagttgaagatatgaagatacgaattccttgaccgaacgggcaaggccttctcagttagacggaggagcctaggtggcagcctgttgaccccgtcgcaacaatttaaacactgtaaacaaacagcgtttactctgatatgagaatactagtggctttaaatcaggcaacagagcctaaaatggattcttgatattagtggaagacaagcggctcaccagaattctcgcagatacaaagtaagtttagctcttcgtggagagagggatgctgcctgaggtggattcaggcaccaatctcttttgggttaggcccgagtatagtgagatatcgttttctgccggacattgtgtcttcacttggattaaataatataaacgcatagttaactagctatgtacatagttattagttatctatctatcccctcggatcaagtctccattcaggcttgtgatcacgtgctccgctcagacgtgtatgttgtaggaagcttgtagaagaaatccgatgaggagtatatctattccgaaaaaaatatattatcactttgatttttaggctgttctctcactagggagttttggctatttcgatataggatataggcccgattgaagggaggagaaaaaaagaaagaaaaaaaaggatggagctgcgcggaatcgaaccacgatattcaaggaatgaatcatgataatttcccgttagggagaatcacataagcttgatggactaaccattatcctacagttccttaaccagtagcctatagcttctaattttgggagaaatgaccattaaagtgtggtcgtcttcgcaaatctttcaatcttagtacaccatgtactagttaagacgttcagcattccgaagttaactagttagtatgtattatcttatagttaagcacctcttttgcttagtattataatttaaaggtagataaatccataaaattctttccttggcgtagggtctagggcaagttcgggattgtggtctttggctcccgtatgtgtaccttccgactagttatctgactctagaatgataatctttttttttttataaaaaaaaaaaacacggacatccggagggaactgcaatatattctgttttaactcggcaatatcggacttatctcggtgatcaatggacgtatcagtgcccatataagtgcacgtgcagatggtcactctccccgtactaaatacatgatcattcatcgcccacgcaattttccataaattgcggatgtatcagccttccgcagttggagggtcagtcctggaggtatcacctgcatttaaaaacagatacttgagccttggagcgccggagattggagattagtaatgaggtattgttacagtagctcgggggaataatgcgtggtatatatctatatgggaacagatatgtgcatagttattgattatcaatgcctgttcgactcccactcaaatcatgtataagtgtacactgtcggacatcaatatctagtcgcatttgacagggcctatttggatcagtggagtctcattgtcttttcctatatccaattaaagagctgtaaaataatcgtcgtaatctattagggatgtggggtataaagcgagggttagttagtctacctttaatactgtaaaagaagtaatcgaacagggcatcagacacctcgatattgtcgtcgctaatgccggcattgccgaatcatatccacccgtcaaggatatcaggcaggccgatgtagtcgagcatattccaacgtgttaggtgtcatgtcgttgtactaggctgcgcgcagtctactgtagaagtcagccggaaagcattataggatccggggccggtggtctggcgtatatctgctcggatttgggacacagtaaatagaagcaaattatccaacctccagtcccaagtgcggcgtatcgcgcatcgaaatcacttgccaactggtatgatgttcggatcaacgaggataagaggctcaatgcgtttgtcttggattccgcctgggtgcagaccgacatggacaatgctgctgcacagctttggacctgtaggaggtgccgaagacccatgagaagccaattaccgggataattgaggtcttgagcactggaaccaaggagtagtatggcggcaaattcgtggtgaggttcaggattggtgatcatgggcagatcggaccaaattagggtttctcacatgaagttattttcgataccaaagacatgggagcttaatgccatatcaatgactctagccactatgacaatggtcaagcatagaaataggagaggtcccgaggtccgggagtcaactgctgacataatatagttcgtgccggcgtgctcaaaacggatctcactgctctgttcgttcttctctcttgatcttttgatatacctttcaaacatatgggataatttatatagaagaattatatatttaataaggtcatatacatagtaaccatctaaaatccaaatcccctgttaagagatcactagttatagacttggcaggtacacaagaccagtgacccggtccggggcgccaagaagcgcatcgcccaagctggcctttaccgcatacagcactgcaaaactccgagtcgaatccttcattttcgctgcaataacccggtgctatcttcacgattgacctctcttctctcctttgtgaacctcctatcgtgtcgaccaatctcaccatgacacgcgctgtccagaccctctccgttcttctccttgtctcctcggtatgctacggagtcccttcatctcagaaaggaacacaatcccgcatggatatcactgacaatcgatcagctctacctttcccttttccttggactcgttcccctgaacgagactgtccagactgaagtcattccagttgtacgttacccaccccgtcaatcctccgctccccggacttcgagtgtgtcgaatgagataaaagctaacctacaatcacccagctcccattctacgcgcttattgtctttgcttgctacctcctcgcccgcctgggtgtggcgatcttcaccttcaacgacgtccccgaggcacacgctgagctacaaaaggagatcgagcttgccaaggtggagttgcgccagggcaaggttgaggttgattgattgagagatggctgtgcgcattggttagatggataaccagacactcggaaccaaccttggcatacaaggtctgggcctgggtctggattggattatgtctttgcaggattgaaaaggctgcgccggatcaatataatacgctatgccccagtgactttttgtttccgctaccaatggtatattctcttgatacacttctacaattcaatgtctgcaaagcaacgttggaggaccaggtttccggttgttggctacaacgagactcccggtgattacggggcactccgtttcagaaaaaaaaaaaggagcaaggagtgcaatagcagtttcaaggcaaaaggtcttttgggggcagccagccggtctgccaatctgccaaaattaaagaactttttctatagaaattcatcaaggatatcgtaaaaattacatgctcaggtttgtgcacctggtctaagcatggacagcaaaatcgaggattaaaagtgtcccaaatatgaaccatcagagcatcgcacaaaagggaatgcttatgataatgtaatcatttgcttaaacaacctgaggagagggttctccttgaaccgcctcagtagaggcttcttcgacatgcttttggggaatattgacgataggggacaatttggcctgactatcgtgctcttcaatattcctacagggaaaaaaaaatcagccacaatccacaatccagaagatataaagttgggggtataacatactcagcctcccaagggtagcagatccagacatccccagtggtgaccgcggcgtggtaacgctggtcattgtccgtcatatctgtgggcagctcacccttcttgggctttttcttgttctattccagctgtcagccaaacctatcaactcaaccttcagataaaataaacaacatacgtgcagaacgaagacaaagaatttagtctccttgtccttcctcggatcattggcagggagctgcttctgagcttttttaacatcctcctcgagctcgttcacggcgtattgtagggttgtgcgagtatcatcgacctcgtcgacgataagaacgttcttgccgatcaagttggccatcgaggagttcatgtcgagccattgcaaacgggtgaccttggtaccggggacctcctcaacgctgtctgtgcccaatttttcgtagagggacagaccgatggcttgaatggggatgttagattgaccaggcttcttgaggaaggacctgtttagcgagtaaggatcaatatagtcgagatgaaggagcacgtgtgaactgaacgtaccggaggatgcgggcagggatgtaaccaccaccaccgatggcgattataaggttgatgtcccagttcgcgaggggctctttcgccgagttcttgcagagattgtggacctgtgaaggatatttgtattagtttcagtccttttaaagttccgagtgatgacaattgtggactgcgataagagacaatctgcattttgcggggttgagggggaccttgatgatattcatgtgtgtttgtgatgtcttcaacctcttcttttttaaaactaacacaacgacatagtgtctagtcaatagaccgggattcttacatcgttgtatgtggcatattgcttgttttccgacatgttggcgattgtgatggtttcgaaattggatggagatatgaagaagataaatgatatcccaataaagatcaagtatcaagaagtgaggtagctgtcgaatgttttcccacagagaaggaaaaaatggaggggaaaaaaaggaaaaaaaaaaaagtcggaccgaaaggttatcggcccgtccacgggtgtgcggggcttttatctgtagacacttctatgttgtgcagcttgacccgggatatattcatattcacattcatattgacatgcattccattcgaatctataatatctaagtataccaactaggctcgggcacttcatgtagtagtgcatatcgtcccaattctcgattcttgtaagccaccggatcatgaagagtgtgcacgcgaatatcccgccagaatcgatccaatccaaccttggaggcggtggctcgggctccagtcacttcaaatacaccagaagtaaccctgagtccgacatctgtggcaaccaccttgacgctagccacccactccgcaacctctccacgttcctgggcggtgagatcagatttatgcgcctggtatcgagtataaagccctgagagttgatcgcctgctcgatcggcaagggcttctgtggcacgcagatgcgcaaagaagttaccatagcgctcgaggatgtagaactcatccgttgcggattccttgttgtcgccgccgaaaggccaagcccgtgttgcggttttagtatatttggaggcgaaatctaaagcaccaagggcaatgcccaagtagaaattgctgaaaaccagttggatgctgtggggaagagcgaaagtcagcattcagccatgtaactgctgaggaagcatgacatatggaatggcatagacagcactcacgttggcaggagtagagtggggaatgcgatcttcagggtgtcatcgcgaggcctcttagtagctgcatcccagcccagtgcatctgaccaagaagcacggacattgtcaatctttacgcctccagactcggtcaggcgcaacccaatgttgtgccagttgtgagcaaactggataccaggctgttgggtcttgaccaaagcaaagatatgatcctgggtaccatccaatataccttcaaggactgtaagatcggacacaacgcctccagtgttgaagtacttgttcccggtgaatacgatatcgtctccgtctggggtgatattcagatcggcgtcgcgggcgttcacagcgccaccgacaaagtagttgtttgaaatgatcaactgatgggttcggtcggcttgttcaggagtgcccaccacgtttgcaatggtagaccagagaaggtgatagccaagcagcataccaatagatctgtcttcttgttagggactatccttcggattcataagggatgttgggatgttacccatctgcctttgcaacctctctgattgccttatatccaacgctccagggttgctcgccaccaccatacttcttcggtcccagaagctttgtcaagcccgaatgcttgagcagggccacttcggcgcggggtgatttgttctcctggtctctttgggccgcatccttggctagcacctcggagacctcccgggctctaacgatccatgcctcttcggtgtccggcagattggaccatgtggtttcatattcggcgtagacagccggatctgtcgctggagcactagattgggacatggcggaagggtatatgcagtatggttgatcagttcaagttctatttagatcaatggactatttcttttcatgggtgggatatgagagagtttataaatagtttccttgcggggggagatcttacatgcttgtcactccatatcacgcaatgccgtgtcactccaacacccaaaaatgagatccataaaacttcggattcgtcagattcgtcagacaaatacaatatgtcgttattatcgtcaaagtagcgccataattcaattaaggcgttccctgttgcgtacacccgggcgaccgctcatacttagatccttgccaacactgcttgctcgttcatcaagttcagaatctctctacgtaaattctctctgcgtaaattgaatggcctatatttgtggtaccaatgcctgtagataaataccccgcagaatggtatcgaacaaactgtagctcgttgtggtttgaccaacaggcccggaaggggagggcgactgttaccccacccgaaaagcatcgactgttcaatgtatccatgttcaatgtatccatgatgcttggacaagcaaaacctggtgagatgaccgcaggcattatgatcgtgcgatttgatgtgaatcatatgaagctcctgcttcatccactatcctccagaagattctggggtgaccagtactctttctcagggctctgggcatccaaccacactagcccatcagcaagcaagtcatctattacggtttgcgctcgagctttttcccatttgaggttcaaccgcagcattgaaacgctcacaaatcccagcacctgaattacttccaagactgttgcctgatcggtgttgagttctttagggacggaccgaatgtactgcttgctgccgaccttaatgatggagaacccggaaccaagaggctcaagagaccgaactgctcgcaggatgtcgtcactgtcgattacgtatttcagtcagtcccttgtgtagatatccgtatttcctgaaagaacaacttcatactctgaaacctcgagcccacttccgatcgccttgcgcttccctactctcttccgacactcttcaacaccaatcagcccaccattttcgctcctcgtctctctgcacagctcgacaactctgactgcaacctcaaagtagaagtcattcatatctccgcccataatctgggtccagaagctacccccctctcccagtccgcggcggccattcttgcccttgacgttgcttgcggcaaggggatcaaccccgatggtgttgcacatgcgcgcaaactctgctcggaacgtcgggttggactttatcgtagagctatgttctagcgcaaatgtgtggagcaacgactggaaaaccgacaactgggtctgtagggaggcagtatgcgtagagcggagattggcgccatgagtggcataagattgcgttgcctgagttcgatttgcaaaggccccgaggccaactccgcgacgagacatagtatatagagtgtaaggggaatcacttgataggttacatgtatgtagttaccccaggcggtcacccatgaagtcactgataagagacaaacccttatccagatcacgataagggctgagcccataacgggctagcgctagttggtttataggctaaccgtatacggctaggcggtccacacccacacaagcgaagtctcttcttacattccttttcttcgagctttttcttcttcccttgacatccttcgacaaccagccgactctcgacctcgtccggaccttcaaaatggccgctactacgtatgattcccattgacttcttcctaagactgatgcgatctctgcttgagtttgtaaggttgctggtatagtcgtccttctcgctggggatgccagctgtttgtccacaacaatgacggctaggcaccagctcgatccttcctgccctctatctcgattccaattatctcggatacacttcttgtatatcatggagcatttggatacagaaaaaagggtgatggagtcttgaggttgaaagcgcttggcgccttctcctccaaaaatattgttgtgaactatcgttctcgggcgctcatgatgtggtaacagcgtcttgatcctgaagcgacaaagtgtcaacatatatttcctgaacattgttcggggttttgtcggatgaaggcatcaatggcatcttgcgggtgatccggcttacgaacactatgctggaatatgcatagctagtactgaactgtaaacgatcattaaactccgatgccttggccctcactgattaaagacatttcgtcgagttattttatgccttcagttgagaatgtggcgctatatgctgcaattctttcactcggcgaattgtctcagtctcgatctatttcggacagactgttctaacactgcacagctccgttcccacccagaaccaggtcctcgttcccgagacccttctgaagaagcgcaagtcccaagaggctgcccgcgctgagcgccgtgccgaggccgagaagaccaagaaggtcagttttcccgatttttttcccacattgcgacacctcccttccaactacatgatgcataacaccattcacgatgactagaccgctaccacggtcaatgctgtcgtctgtcaaccatctttcgggtctgacattagttacacaactatttgccattttcttcacaagactttggagactctcatgctgactgagattcatataggccaacaaggagaagcgtggtgtcatcttcaagcgtgccgagtcctacgttcaggagtaccgcactgctgagcgcgagaagatccgcctcaaccgcgttgctcgccaggagggcagcttctttgttgagggtgagcccaagctcgtcttcgttgtccgtatcaagggtatcaacaagattgctcccaagccccgcaagatcctccagcttttgcgtctgctccagatcaactctggtactttcattcgtctcaccaaggctactcaggagatgttgactatcgtcaacccctacattgcctacggttaccccaacctgaagtccgtccgcgagcttctgtacaagcgtggttacggaaaggtcgacaagcagcgcactcccctcaccgacaaccagatcattgaggagcacctcggcaagttcggcattgtctgcatggaggatttgatccacgagatttacaccgttggccccaacttcaagcaggccaacaacttcctctggcccttcaagctgtccaaccctaacggtggtttccgcactcgcaagttcaagcactacatcgagggtggtgacaccggtaaccgtgaggagaacatcaacggtctcatccgccagatgaactagatttattctcatgaggaactcgggttggagcgttctctgagcgcacttcttaaaaagttacaaaaattttacgactttactgtcttgggttgtttttttgcacgggctgtttatatccactagtcaattctttagcgatacgatggtctggggtttccgatcaatttaatgcttcaaacaacccaattgcatggtcgtggacttggttcctgtcgtacgttttctcgtaactgttaactgtattccacgactgactgtcccagggctgggcagtcttcaatctacaacactgtatcggagccctttggtagtaatcaggattttgttaggccgaatactatcccgaggtcggaattccatgtcgttgagctaccctataggctatttttgaagctgtgctgaagccgcacgatcttatgatgcccatcatctcgataagctcattattgtagtcaaccagttggctttagtggtctcatgttttgtctagaccgtgagtgactggtcaattcatggcatgaatgtgttaatatcatataacattagatttaccaactctttgaataccgagggagatagttatcatcatataatgaagaagtaatcccaactactacagggtctagaatcggagtggacaaatcgaatcttggggtgatatatatctagctgatacctatgtactattgcattccttccaacgtttctacgtcaacattagattttaatgaccctttgaactctcctgttacgattgaccacaaggcagagctgtcgtccctgccagtcagagcccgatgcggatgggttatgtggtccaggcttgaaagcgccttcgcggagggtttcagtaaagagctcgtaggatgggtaatctatatcgataatttcagtcagtatattcagccatcaatagtgttattgctctctcaagtatacacatacagccgtccacaaagttgttgacctgttcttcggtcatcccggtgcccttggcagcacggagtgtgcgttcttgttcctggcgccattcgtagacgaaacgaggggtttcggcatcgctgagactggttagttaaacgaaagtattacagcaacaaagcacatacatatggattaaagcatcaagcttgctgcaaaggaaacccatgtcagcaaaatttatagttgcgcaattgcaaatggcagaataaacccactcggtcaagacatcataccgcttcaaagcgtcatttacagctttaacatcctcaaacttgacatagcctagtcgtccatcatattcgccgttatctttttgacgcacagcggcctcccatttcgcacgcagggtttcgtcatcccacgcacggaacccgacacaccacccttcgaaaatcacgaccttgactttatcctgaccctcttgattgacgacctcccattgtgcctttgggacacgatcaccttggccctcgaatgcagacttgtcatactgtggaatggctgtcggacgttcagcggcgagcgaagcaaacacctcctcacccaatacgaggtcgtgagtcgaaggttgaccacgatgctgcagtagtgggtttgaaggatgcgcttgtgccagagctatctgatcggcatggtcaaggtagatatcatcaagcgatagcgtcacaaccgcgagcgaatatggttccgagcggagggtgtcatggagagcggatacctacggagactggtgttagattccgttccgaggaaattgaacgagatctcgaggcatgggaaattgaccagctctagatcgactcaccagaactgtcttgcccgcaccctgcacgccattgagaccaatgaaaaacggcggaatactggggttgctgcggtgccgctctgtatgaacgcgcaggcgatcgagtatgaaagggatgcagtactgtgacttgtcgtccacgatttcaggcattttggcttagttttaagttgtctatgttatatcgcacgtcttttgtatctatcggctacggtacgcggaaagtttcccccccaatcggccgagtgaatctggggtcatccaccccacggggtatgttcagccgctacttttggctcgacattttaagaacctcggaattttatcaggaagtgcattggatcgagcaacaagacaatggaacagtaaaatagtccttatacgaaaagatgtacaagtgcacatgataatgacgttgcccgtcacatgcctgagtcagcaaagactcggtcccggaagacatttacaacgcttgcacttacaatgatggatatatgcatatgtttcttatgcataagtatagcaatttagtctatatccccgtttattttcattaaatcatcagaatacttaaatcacttgtatacgaagtacgccggcatgtgatacgggacgatctgccattgtaacgatacccccatatttcatggttacaaaaccaaacgtgccgaggtcctccgtttgccgagttgctttaaactcccctcttctccagctttcttcctttatttctttctattatccacttgattttcggacacatcatatatacagaatgtccgagttgcgatttgataaccaaacggtggtcgtcaccggtgccggtggtggtctggggaaagcatatgctcttttcttcgcctcaaggggtgcaaatgtcgtcgtgaacgacctcggtgtctctcacaagggtgagggcaagtcgggaaaagtatgccttatacctccgaactagacaaacagatactgacagctactccaggccgcagatgtcgtcgtcgaggagatccgcgccgctggcggtaaggccgtcgccaactacgatagcgtcgagaacggtgatgctatcatcgagaccgctattaaggccttcggccgcattgatatcctgctcaataacgctggtatcctgcgggatattagctttaagaacatgaaggatgccgactgggatttaatcaacagagtccacacctacggtgcatacaaggtgagcaccctcggagacataaaaacaagcgcttgaaacaggaactgatagccttttctctggacagtgcgcaagagccgcgtggcctcacttccgcaaacaaaagttcggccgtattatcaacactgcctcggctgctggtctattcggcagcttcggccaggccaactactcagctgccaagctcggcccggtcgggtttacccagactcttnnnnnnnnnnnnnnnnnnnnnnnnnnnnnnnnnnnnnnnnnnnnnnnnnnnnnnnnnnnnnnnnnnnnnnnnnnnnnnnnnnnnnnnnnnnnnnnnnnnnnnnnnnnnnnnnnnnnnnnnnnnnnnnnnnnnnnnnnnnnnnnnnnnnnnnnnnnnnnnnnnnnnnnnnnnnnnnnnnnnnnnnnnnnnnnnnnnnnnnnnnnnnnnnnnnnnnnnnnnnnnnnnnnnnnnnnnnnnnnnnnnnnnnnnnnnnnnnnnnnnnnnnnnnnnnnnnnnnnnnnnnnnnncacggacacgcgggccaaggagggtgccaagtacaacattattgcgaacgttattgctcccattggtaagcaagctaaaaaccccaacgcatgaattggaaaagctaatcctaaattagctgccagccgcatgactgcaactgtcatgccaccggatgttctagagaatcttaaacccgactgggtggttcctttggtcgctgctctcgtgcactcatctaacaccactgagaccggtggtatttatgaggtcggtggtggtcacgttgccaagctccgctgggagcgagctaagggtgctctcctgaagactgatgactccctgacccctggtgctatcgcccggaagtggaacgatgtcaacgatttctctcagcccgagtatcccactggccctgcagacttcatggccttcttggaagatggcctgaagacgcctagcgctcagctaggagaggagcctgacttcaagggtcgtgttgccctggtcactggaggtggtgctggtctcggccgtgcatactgtttgcagttcgctaagctcggtgcctctgtggtggtcaacgatcttgttgacccagagcccgttgtcgaggaaatcaagaagctcggtggcaaggctgttggaaacaaggccaactgcgaggacggtgatgccgtcgttaagagcgccattgatgccttcggccgcattgatatcgtggtgaacaacgccggcatcctgcgcgacaaggctttcaccaacatggatgataacctgtggaatgccgttattaatgtccacctccgtggtacctacaaggtgaccaaggctgcctggccctacttcctcaagcagaagtacggccgtgttgtcaacactgccagtaccagcggtatctatggcaacttcggccaggccaactacgctgctgctaagcttggtatcctgggtctttcccgcactctagctttggagggtgcgaagtacaacattaaggtgaacaccattgctcctaatgcgggtaccaatatgacccgtaccattatgcccgaggagatggtccaggctttcaagcccgactatgttgctccccttgtggttttgctgtgctctgacatggctcctgagccctccaccaagggtctctatgagtgtggtagcggttggtttggccgtacccgctggcagcgctctggtggccacggcttccccgtggacgtcaagttgacccccgaagaggtagttcgcaactggaagcagatcaccaactttgatgacggtcgcgctgatcaccccgaggatggccaggccggcgcggagaagatcatggctaacatgtctaatcgcgtgcacggcgatgcctccagcgagaacgatatcctcaagaacattgagaaggccaaggccctttcgagcgagggaactcccttcaactacgaggaccgcgatgtgattttgtacaacctcagcttgggcgccaagcgcacagacttgcctctggtctacgagaacgacgaccacttccaggcccttccctcgtatggtgttgtcccctggttcaacaccactactccctggaacattgacgacttggtgaaggatttctcccccatgatgctgctccacggcgagcagtacatggaggttcgcaagttccccattcccaccgccgccaataccctgacctatcccaagctcattgacgtcatcgacaaaggcaacgcggccatcgtcgtggccgggtacacaacgaaggatgccaagaccggtgaggatctgttctacaacgagtccagcgtcttcatccgcggcagcggcggcttcggaggctctcccaagccgactgccgtgcgtgccaaggctgccactgctgcgtacaaggcgccgcagcgccagcctgatgccgtggttgagcagaagacctctgaggaccaggcagcgctttaccgcctgaacggtgaccgcaatccgctccacatcgaccccgagttcagcaaggttggcggcttcaagacccctatcctgcacggtctgtgctcgctcggtgtttcggccaaggctgtcttctccaagttcggtccctacaagaacctcaaggttcgcttcgcgggtgtcgtcctgcctggccagaccctgaagactgagatgtggaaggagggtaacaccgtcttattccaggccaccgttgttgagactggtaagcctgccattaccggcgccggtgcggagctcctggagggcgctaaggccaagctgtaaaatatgagatctttggttgaagcgatgttgacattagtaaagcgagccggcacagctgggtcggtctgttgcttcttttttgtatatactacctgtgctttttgtttttagtttccccatgatgcatttatcagccgctatctgatctattaactattcctacatatgtacctgtatgtaccggattttaggccacagtcgcgaatttcccgatcggggtgccgccgcttttatgaaggcgctcaggctcctgctcactgagtatttcacagcacgggtgatcactgtgagcacttagcttagtaatgtaaaaatattgctaaaacgagtatcttaaatcacgtgataggtggatcattcatatgtggtcccgaacggatgttagggcctagtatatataccgctgcagtgacaatcggaggttccgattgtccctatgatcttttggccgagtggctaaatgctcttatgtgatcagctaggcgcagcggcctaagaaaccctctggattacaattttgtgtaatactagtcacgtgaccttgtttcttttcgcaaaaaggtgggtccatacctgatttttactatatacaggttttgaaccttgaacactagaggactgcgtactataggggttcacattactagtgtattctagtgcgagtgttgagaaacccagccagttcttagtaactacgtgggatccaaagggaaggcaaaaaaaggcttctcaatgtcgatccagccggaatctaaagactctctatttttatatgtggtcaatctagccagccaggccccactgcaacagtactttccaacctacaggaccctagaccgatccaaaagtactgttgcacctagaccaagaagattaaagactacacccacgtctacagaggcaccctcattaattggctcaatttaaccggatatcgccttgtttggaggtgataaaaatcccctaggaatcttagcagtagtctagtaatatagtaatacaaaatttagggctaacacagaatatatggctcttttcaccataggaagtgcaaatatttagtggcgttatattatcagcgttattgaactctttggactactcagcatcaatcggagcagacctggaaattatttaatatatcctcctgattcattttccttgtggaatttctagttttatttctctggtcgatccatcaattttcaggatatgcatagacgtattgattaaaagccaaaccaacaagcctcaacctcctattaatattttaattaggcttgacagtacttcctgaggtacctccatatgagcaaagtcacgacctacaagatgatatgaaaagaaaaaaccaacaacaacaacaagcaagaagcgaacaaaaagcaaaaaagcaaaacgaagcagaaaagaaatcaagaacacgaggcaaaatgtgagcggtggtaaaccactacactagaataatcccaacgtccgtcatagggtcatcctctgctgaaacgtccttagacacgaagggggggagagagatgacctcttgcataatgtaggtcaagagatcaactaccttaccgtagtttcttccgagggctcggtgggaaacggttgtccactattcataaatcagacacttgccctcagtagtaatgggataattggaccatacctcgctgtcattgtttatttggtgaaaatgaaactcatctccatcactagccatgccgtagacaactgtattgacctttctcagggtcttacgttcttggtgaacgatacctaggagaaaaggggatggttagaaaagtactgttagacatagtctattaagacatacccatgtagccaaggagttgggcctccccagcgctcaccatacccttcttcttggcctcaacgataaccaggttaatcgccttttctgacatcgcacgggtttctccgtaccacaaagtgtaatccgcacgtccgctggttttgtactacctcgtatcgtacaggatcgcgcgagaggtcatgcaggtttcgtgttctaggttcaagggccattgcctatggtcgctagacgcagagacctgatccagcactgagtatagtagaatgtcaatgacgcatcgtgctgctgtttctttttgagtgctgcactagctgcctctttgaactattcctaacatttcgactattagatgtcagtatgtggtcactgagttattgtatccatatgaccaggcagaactgagcaaaatcagggcaatatgtgggaaaacgtaggttattgggatatagcctagccgaaaagtacttccagggaagggacttacgagcacactgtgggagaggggctcctggagggggatgcatccacggggcctggtctgttgggtttggcgttaggcgaaaagcgacttttacttcctttcgggtcattttcccaatggggacctttgggagagggagtgatatctgcccatgttgttgttcggttttggctagaagtgcccagaactcatccttttgttctagtctcagacattctttggcatcctggtatacctgtttcaacaagagggaaggatccttaagtaagtctgaagacggggatatgggggtcggaaattctgatgttggcgaggaatccaaagaggaactcgaagatcctggagacaaatgtgtacccatcggatacgacgatacaggcgccgaagacatggatttctgcgaagaatatgaggcttttcggggcatgattgtgggttaaaatggttgttgtgggttggaagacgaaggggagggaaacgaaagaggaaacagatggatgagggtgactgccaccgcgacccaaaaaattacctcacctcatcgacactctggccgccttcctttttgttcacaattggcaaagaaggcttcggaaaaaccttagtattacctcaggtcttggtatctagaaagcttcgtacgcaatgtacccctttagctgacaatacttttcgcgtgctacatacatgtatccgcctcctttagacgacttcctttcatcaggagtgggagttggttcataaaaaagaatactaccaccttctttctcctccaatatcatttagctcgcctaaccatgaggtataaaaagaaatatgtactttgtagcagtagagatggggataaacgtacgatgtacaacatatcggcactttgctttgagagcgccgatctcagtcagccaccgaatgcgataaattagcttaaggatagagaaaagcagagaaacagaaaagacacagaagagcaaagcaaaagcgatgcagaacaaagtgcaagccaagcgaaacggaaatatcaaaaagaaaaattatcatgcttccttgaaagagacgtcttcaggaggcaaattctccccagaggctgaagcagggggaatggcttttcgggggagtaaatcagggccgagcgttacacccacaaagtccaaatgtacaacgctggtccacagaacccacccttcccatgacatctgtaggataaagaaaacagaggcatcggtttcgaatgcattgcaaatctcaacttccatgttcgacgggagtgagcgaacggcttttgaaaagtcatccacagcgtctcgttgtccctcaagcgtcagcttcaccagcacgtgattttggctcactccagataatggccgagggaggcgggatcgactagtatcactgaacgcaaggctgattgctctggtgccgctaaacgtttcaaacacggcgtggggagcatgcttaggcttctcgacttgtacttgctggtaccactcagccgttgtgaaattctgttggttcttaaacttttggacggcacggaacagtctttgggtaaacgaagcggtatttgagcgtacggacgcaatttcttgaactccacatgccgcaatgatgtgaatgttcgttgtcgagttgggctgccgtgctgcagcagccgcgtggcagcaatcgagtattaccagagaatccactgactgtgcagattccagagtacctctgatagaccgccacagaattcttttgtgacgtgacgtaaagcacaaagcatcatcatgaaggccaccatgaccaacataaaagaaaatgaacagagagggtagtgacgaccggatacattgtccaaggagtttgttgagattctcttgcaggctccaggctggtgttttgtccgaattcgggatcacaaatctgttacattggaccccaagcggtttcagaattgattccattgtcaccatatcattctctgcgccagtttcatcgttttcccaccggatcaatatgccaatctttcgcacatgaaacttgctccgtgcggaagctactttcttcagcgctgcttcaaggtcaggaagctttctggtcgagactggtttggttgggaatgagatggggatagtgcttgggcttgcggccgcaggttgctttgcgggtgactttaagcctggtaactgcgacatcttgctaagagaacaaaatgtcagcctgtgtataaagtgaggggactgatcttagcctcacttctcggtcagatgagactagcagggttgtagaaatcagaagggtgattgttgtttggcaaaaaaaaagtagtagtgcaaaaatcagaaggttgatcgttgtttgaggaaaaaagcaaggagagttaggaaaggggaggagggtggtgtttatatctgtgattttgctgccttcccaattgggcgacggcgaccatccatggattccgttggtcctgtcttctttattatttctattgctctcttgttcattctattgtcctcttgttcattcctattgttaactcataactctctcaccttcaatctctctctacccgcgcttaaactatgtaatagccctggaggtaagataccggaactctggggtagtgatatacaagagcctacaatgtatccaatcagtggcacgctaatcgctccactctaggacgcctaattctataaatgaaatcatccactgcccttaggattgatcgtagtatactttgttaagtatacattacggtgaagtccatgtcgcgggatagtcactagaatattaggcatagatattgtagtggggagcctacctccccactacaatcagtacatatcaccttttcttgttttttttcttttaaatgttgttcaggcgttatgttatataagcgagcattgggatttgaggttactgtcgaagtccaaggtcaatacatggtggagacagggtaattcacccagaatatcatatgacatttggtacctagcatgctatacaaaaatgtatattacagttagtcatcgatgtccgcatagattgttgaaaaagcgggttttgtcatttatgttagagtcatccatatcagtcatttttaccatacattggtcgtaccacagatttctgtcaggttctttaaaggacattttctgccatcaagaaaggcatagttactctttacattccatgggcccggatcggatgaggttttatggttcttacaataaggattgctagaataggcatagtagttttgattctactatggttcgtcctaccctgtcctacctctatcaagtccctaggtctgaatttcttctttcttttctttccttttcatcaatatctctgcctttaacttcagcaaaaactctcacttatcttttacctttactaggccttgacaactcccatgggactagaaaaatttcggtcccagattcttagttaatcactaatttattttcgatcgataatttaaatataggctattctactctaactcccttaaaggctaaggggtcagggaggtatagctatagttatatggtttatctcgtttctaataacccctaggcaggttcgtttttagtctcgttattcttattagattcttcttatactattacgtttatcaagactagctctttaagcttcttaatcctttcctcttatactcttaggtagggtagcggctcgcttatagtggcggctcacttaccgattacgttaactgagcgggtctaatgattatataatagttaggggcgtgttcagttttactcagtaagcaaacagcggcaaggggtgagcactaaaacagaaagggaaagccatgtcgcgaggcctaaaatccggtatatatgtatgtccgctcaagtgaattatacttatattgcccacgcaacggccacaaatgtacatccgatcaatgtagcgtttagtaaggggaatcaactctggcattctataccagcagttgtataaatatagattctttgctattttagttttatagtttgacattgcgtgacgtattcccaaggagcatgcgattgtttaagtgaatcgtacggtgtagatgatgtttcagcatggcttaaagggatcgaatcatatactgtcgtgatatggtgtaagagaaggaactgtctatctagcaaatagaaagaacatttaatgtctaagagatcatagagtgatatcgatgtaaaaggatataagaaaggtgaaaggcggaagatcgtcttatgtaacaaatcctccattcttcactgttcaatttaggctgcttccaatacattattacatatatcccctttccctttctcttcccctgacatcttctgacatcttctgatatccccttgacactttcatcttcctaaaccatgtaaagcctacacaaccatggtgctctcgctgccagttcccggcttctccagatcctccacatcccgccccgccgatggcacgcaatctaaccgaaagtcagcctccggttctgaaaccagctcctcgtccagtcgcaatgcccggaagccatctctaggacagactggctcctctcctcacagctactccatcaccctcgaagcactacgaaataacccttttggcagtacctccagatcccgcggccccgtccagttctcggcccacgaaacagaggaacacaagcgggaacaggaggaactcaatacggcactcgagactctggttcgaatattccctgacgtacagatagaggtattccgcgagctgctgctacgctttgacggacagagccggttacaagtgtgtgtcgaggagctactcaggcataagaagaaatgggtttcggggcggtggaatctcccggaaggaaccacggaagctgaggcagagggaattgctcgcacagtccctggagacgaaaacttccctcgacaagacgttggcaatggcggcctggtcccccccgaggagcggtttcggttcgatgaatacaaggccgctgtgcggatggctatgacaagagaatataatggcctgaataagagtacagtggaggctgtcctcgctgaagtcaacttcagctatgctcgggctcgaccgacgcttcgggatctgtcgcgtcggacatggcgcgcgacattcaacagcatgttcccgtctttcaggcgaaagaaggaccgcgaagaacatccgcttctggtctggcatcgtggtgtagacggggagcttgttcctgttctgaaggagaccgggtgcagcgagctggatgcagagcttcacgagatgttgttagccccgctgttgcgacagaggcgcgaagagcagcatgataaggatttccgatttgcctcagagttgaatgcgaaggaagcgcaagaactcaatgccctttatgaatgcgagtgttgtttcgccgacgtgacatttgaacagattgcgacatgttcaaccaacactcatatcatttgttaccactgcatccaaagaaccgtatacgaagcattatttgggcagggctggggcaagtctgtcgatttagagcgctctactttgaagtgtcttgcgccgttgtccatcgggtcgtgcgagggatgtcttcatccggagatcgtcaagcaggcaattattctcgacacggctggcttcgagacatatcgcaaattcgaggatcggctctcctctgaggcgcttatgaagtctcagctgaagctcgttagatgtccattctgctcctatgccgaaatcgacccagtctaccacccttcgtcccatggtgtccgctggcggttccgtcgtgacggtggcattattcctacgattttgatgacccttcttctcctggatcttatcccattactcgtaatccctgttctcattctgctccttttggacccggccaccgtaacagcggtcttcggaaatgccattcgcaacctctgtctcaagatccgacctaaacgattcacatgtgccaacccctcctgctcacgcaccagctgtatgacatgccagaaatcgtggcgagacccacatgtgtgtcatgagccgttactcctggacttgcgcgctaccgtcgaggctgcccgcaccgccgccgtgaaacgcacctgtccccgctgctgcctctcattcgtcaaatcttcaggctgcaataaactcacctgcgtctgtggttattccatgtgctacttatgccgcaaggcactaggtccacctgtacgaacacccgcgcctgcccgtgccttccgcgggttcgatgccttcgatggcccgggcgatatacccgatgatacctttgacgaacaggtagttggcaacatgtccgaggatgacgaattcgaagaaccagaaggctacaaacacttctgcgagcacttccgcatcaacccagggtcccgctgcaccgaatgtaccaaatgcaatctatatcaagcagaagacgaggaagcggtcgcccgccgcgcaggcgagaaagccgagcgtgaatggcggatcagacaaggtgattccggtgccagcaacccaacttcgacagctgggttccgcaacgtgaatcatgatctctcggcaggggccgatggccactccacgaatggccgcgcgacggcttcaatttgggacttgcagcttacctcttcgactaagccgtgggcttactggctcagtgatgtgtgggctgatggacggtggaaactcgagggtcaggcttttgcggactggattgtggaacgggtcatcgaagttgacgatgtatgatcccgggtctacgttcggctacacctttgagaagattttttttcgccttgctttttatttcgggctgcatcttgcaataatggcgcttggtttattttttgcttttcaacccccggtactctatgcagagtatctggggtgacgtgcagtcaatcttatttgtttggagggtttcagacggtatgatgattgatgacactccctacttctgtttgataattgtgtgacttcttactaccaagatgtagcgaggacccttactttctttttaatgcagatcttgattttgagaccagtgtcttctactcctaattgaataaaggtaagctgtcttctctctcttcgggtttcaatatgtcaagtctttgcttccaattccgagggatttgtaatcaatcttctgccagtataactatcgcatcaaatgtgaagttattcattgtggtatacacaaaatgcttcatcccccaggtatttcaggtatctcaggtgtttcaggtatttcgcatcggatcagagagccgctggtcctctttcagccagccatgcttgatcgccccgtcctccgcaatgtgtcatcgccgtgaggaagctctaaaatcgtcggtcatactcccgacaccagtcgtccaggcctttaggccagtattctggcttttcgatcaggagcaaccaggatggtgcggaggaaaattctaccggggctgccgatagtaaatgggcttgtgctattattagcactgagatcatgcacggcacattatattatttctattgaagtgaaaggaactgaaacaatggtctatatgcttttatcagccaaagtctccatagagtgccccggcttttcgtgagctctcagacgattagacctagctctctcttttttcttcgtccagctctccattgattcgcttttttccttcttccttcaaagcttgatcatcggctcggttcaaaccaacctgtggcatcaacaaagcagccaaaaagaaagcaaatgtcgcaagggatgcaccaacaatgaaaatgatacggaagcccttttgatatgccggtgtcagcactttacggacatgctcagaatcctctgcagataaccttgatagatagctctgtggacttgagagaagagagcgggactgagattcgtcgagattgaggaccgagatggacgacgagacaatattatttctatattggttaacaagagaaccaaaaaaacagaattgaaagaatccttacatgatagttccagcgacggcgagaccgagagtaccgccgaggtttcgtatgaaactgctcacggttagctctataaaatgactgacatcaccatgggtgccactcacttcctgaatgaggttatcacagccatatcccgtctttcgacaccggcttgaacggcaatgagagagctataatgaattagtttaattcatttgactaggataggaagtcacatacggctgaagagtatttccaaccccgacaccagtcaggatgccatacccaatctgctttcccaaccccgaatgctgatcgagtgtcgagaaaagaccaagaccaacagcccagataatccatccaaaacagatgcattcacggtagcgaccgacccagtgtacaacaagaccagaacctgtactgctgatagctgtggatgaagtcagcatagcaacgcaaccaagaagaagaggactcatactttgcatgagggtaatagggagcagcattgcagccgcttttaccgtcgaatatccaaataccagctgatagaaggtgggaatatagtagatttgcaccaaaaagttccacccgttgatgaacatagtcaaacatgcgccattcacaatcctaccctggaagatatgcataggaaccaacggtgtcgaagtacccttccactgccacgcaataaaggcaagagagatggcgaacccaacgaccagagtcgcaataacatgtgctgagttccattcatactcaccaccaccccaagtcaaaccaagcagcaagaccgaagttcccccgagagcaagaagggcaccaaagaaatcaattgccttcagcttaactttccagttgccagtaactttccgaaggggcataaagaaaaaaacagccagcgtagttaatgcagtgagaggtagattcaagcggaagatccatcgccacgagtcttgtgaaatggaggctagtgcacctccaatgatagggccaatgccattggcaatagcaacaacggcacctagaataccttgatatttgcctcgttcacgaagaggaacaacgtcgctgacgatcatttgtgcgactgtcataagaccaccgccaccaactccagtgaaagcacggaagacaatcaattgcgtggctgtctgcgcaagggaagctgccaatgacccgaagaaaaaaatagccaggccgacgaagagcacaagcttgcgagaccagatgtcggatagttttccatatagtagttggaaacatgttgatgttctgtgtcacgagtgttagtatcgtgaatgcaagagaaaaaagactactcacacgaagtaaccgcccgaaatccaggaggtctggtcgctggctcccaattcatttcctatgatagataaactggccgccagcgtcgtctggtccatcaatgccagaagatcaacgctagaacatgccaggaagatctaggggctgtcgttaattgggccagatattgcttgttactgtatctactaaccgtgatgatggtgcgcttaggcacgtaattagtttgttcgttgaaggtgacattagtcccattcttctcaactgcaacagcctctgttgagtttgaattttccagtacccctgtcatggcgtattgatatcatgaagggataggaaagtaaacagcccagatatgcggtagaaagagagaaagcaaaaaagagaagagcccaagcggactaatcaatttcatctattcacattcgtcattcactgattcattgatcagcgtttagtttgagcaccttgacagaagatctgcgcattagagttggcaaaacttctcaaacaccctcaagatacccgcccctttataccatgtacctcggaatacgggaatattttcagctgatagaaactaaaggtgaggacctttgtgatcattgaatcaattctagaggaccttgtcagactatgtgacatgtgagaaatcagattcaagaacatcgcaaggtacgacgtcaagaataccagagcatgacgcagccacagtacgaattattccgttttcaaccattctatatccaattcctgtgacaaagaggcttaccttcatccgtacagagagttggatctacacttgggccgtgtcaatatccccgagatcgctcatgcgatttccttgttcatcattttagcaaatctccaagacttcagcgtccattcatggcatttgaccctcatattagtcgactcagtagtggagtacgagtagatcttactcactacctcttggacgccaaggaagacgcaacaggatggaggggaggggcaaaggatgaacgctgtagaatttattctgtataattgcccagagtgacccgggattttcttcccttatatctgctttcgtcactcgaggagattgtatgctactcgactagtatcagcatctatatctcgcaccaagtgtgtttcaacaatatggtcaattcttccgagaaaataaccaatatgaacgagcacaatgtatacttcggcattgactcgttgaagaagtacttcgatccggactgtcagcctcctttgccccttgtagagctgccacctcatttgaatccttatcaccaagatggggtacggatatatgccaaaatgatgaccatgcatccgactaacaacgtcaaggcaatgccaggtgagaaattcccgagagaacaccgagcatcaattgcaagctaacacgagaccagcattgaacatgctggaatcaagtgttgtgcccggcgagacgaaccggatcatcgaatacagctccggatcaacagtgatttcgatgtcaatggtcgcccgagtcatgcacggagtaaatgacacccgggccttcctgagcaacaaaaccagcgatgcaaagctgaaactgatgcaattcttcggtctcgacattaccttgttcggtggaccatctcaaccagagccattggacgaacgaggtggcattcaaaatgcccgaagaatggccctggagtcagaaacgattgtcaatcccaatcaatacgaaaacaacaacaactggcagtcccatatccgatggaccggtccacagatcttcaagcagctgcctgaaataaacgttctctgcgctggtatgggaacatctggtaccatgaccggtctggggacctatttcaaagacgtaaagccatctgtctaccgacttggtgtttgtacagcccctggtgaccgggtacctggtcccagatcatatgctctaatgcgccctgttgagtttccttggagagcagccgtggataccatcgaagaagttggctcggccgaatcctatactctctctctaaacctatgccgagaaggattggtctgtggtccatcatccgggttcaaccttcaaggtctctttcagacgttggcaaagcgcaaggctgcgggaactctatctgagctcgcagggccagatggcacaacccactgcgtcttcctctgctgcgacctaccatatcagtacatcgacgagtacttccaaaagctaggcgaggagcaatttcacccaatccggaacgaggtaaataccccctatatgacgtgttggcgtcttaacgagtcttggaaatagaacaagagttgacctatctactatttaccagcgcctgacaaaagttgacctgcaccgatatgacgagagctgggagcgggatgcgttagatgtcttaccgcagttttatggatcaccgcgatcgcttgcgcaaagcctattgagcgagattgtcctcaagccgcagaatcacgttctggacttgcgccaaaaaaatgatttccacgcgtggcacctccccggatcgatacatctgccattgtctagtgttcgacctcacagcccgtcaccgttctcggatccaggtgttctggaggcacaatgggcggagctagagaagatcttcaatgatgacgtctttgtctcagatctgagacggcatcaaatcctcgtggtatgctacgatggggattcggcacgcgtggctactagcgttcttcgggcgaaaggcctcgaagcagacagcgtgcgtggaggccaccgtgcgctgaggatgtatggaatcgggaatgagagcccgatctccgttgagaaggggcctattaaggccactgtttctgtggcagcggttccccttgaacagagaacctgagacccaggaccgtagcgcaatcgactgggaaaatgcggaatgtagggttggatttgccatgtgaagcgctagtcccgatgcagacatcttgtacctcgtttttcccccttcttttcttattttcttggtcttgttttcaattacttcatcgatttggttcattgtttggcgcatactaccctatgactctttcaatgagaatattgttttgactccttttctacatcttcccacgcgtaagagaccagtgtccaccttgtctctccgcatgcgttgaatagctcgcatttgagagaatcccggaatattcggaagtcatgcaaggacatgcatgatgtatgatatttgacgaggggtgctgacccccacacggtgtcagatgtcagatccaatttatatcaagcgcaaatgtgctctagtccaattagcctgtgatattccaaccaaccacgagtctctgaatgattccaggccccatatctctatgaaatgtgctcaattgtgagcagatcccctcgggtgatcgctgggaataactgaaatgactagaatgttaattcaaaccccctcgacaggtacaaggagaataaaggagatatcccgttttcggttccgccacccaaaaacaaacttgctccagatctgtcgatcataccttatgtattccatgatatctgtatttccttgaccatacattgtaggtattggtatcacttattttcggtcacacaaaatgatggacatgaagatggccgagggcacaccctggctcgatcagccggtgatgcttcattcgtctcgcgccgacaaatgcaagctgaccgagtctcaatgtctctatcgcaactatcactggcgatactggtatgcatgttcttccgagtcacctccatgtatgtgtgcttatcggaaatctgttctaggtaccaagccgaccatgtttacgcattgaacaccgtctacttcatgtgtgcggtgattggggtgttcgcgatctcgaacttgcttgtacgatttgctccagatagagtgaaacggaccagaccatggcgcatgttcacctctgcctcacgatacctttcttatcgtggatatcgattgcctgcgctgcgatattggtctccagcattaggggtggtgattctaggtgctgtaggcgctgtcttcttcttcggtgggtgtcttggacttgcgaggatgtgacggggatggtggttgacttctttatagcgatgacactcggcccgcaaccttattactggccaacagatgcttcttatggaagtagtcctccgattgcgactcgatcgggctggatggctcttgcgctgcttccatttgtactgtgggtgttggattcggagcatacaagtcggttgctgaccttctttagggcactgagcacgaaagctaacatgatctctggcgtgaccggtattccgcatgagaaacttcaagtgtttcaccactggactagctatgcgatgtttgtgttggccttgattcacaccttccctttcatcatatatcatatctggaagggggatatgatgtatcagtggaagacaagtgtcgtttactggacaggggttgctgctctcatctcacagacatatttaaccctcatgtctttgtcatttattcggtaggatcacacctacctagcttgactactagaagactaactcttccacagcaatcgattctacgaattcttcaaagccacgcacatcttcgtggcggtggtatttgtcgtgtttttcttccttcactgcgatttccgactctcttcttggtaggttcgactgcaataagccccatgatgacctcgcattaacatatatcagggactacttcatagcctcaggcgtgatctatttcttaagcatcatagccagtcacatccgtacctatctaatgcacggcatccacaacgcgaccatcgaactcgtccctagcggtcttgtccgcgttgcagtcccatcaatcatcaaatggacaccaggccagcacgtattcgtgcgcttcctcacatcagacttacacctactcaccgcccaccccttcaccatctcctccgcatgtcgcaatccagacgaaataggaaaagcctcagaactagtattctacatcaaaatccgcagcggtgtcaccggacgccttggagcaatggcatctaagaatccaggctgcacgaagaagatattaatggagggaccatatggcggcgtcagcgaacctcacatggcgcgattcgacacgattttagtgatagccggcggctcgggaggcgtgttttcactagccatggtagacgaagcactccggctgacggggataaacgcaccggcaggcgagaaacaagcactgtcccgccggaacctccaagtcgtctactcgacgcgcgaccacgctatggtagactggtacatcgatgagatcaaatcacggctgtctgagtcggacatgttatccgcgcagtcggacaacggattcgagactgcggtatctgtgcacataactgacccgcagggattgggaatttcttctgcttcggaatctgacgatgttaagagcacgtttggtaaggtgccgccggctgagattaccactgcggggagtttcagtttgaatgttcaccgcaatgctcggcctgacattcctggtttggttgcgcgcactgttgccatggcacatgttcaagggacacatcttcagaagaagcagcgggttgggattttggtttgtggtcctgcttctatgctacatgatactcggaatgcggcggctttggcgcaggccagggtgtttgggggtgagattgaggaattgtatttgcattccgagcctttcgtgtaagtctttggtttccttgctatattatgactattggctaactggtttctacaggtggtgagtgctatttgatacagagtagcatctgctggattgatcttactctttctcttctcttctaccagtttatttattgcttccaattacatacgtttccatctaagacctatgatttgctgcaaccaaaaagaatcgcataattatctcagaaaaggagcaatatccaaagaaatccaatttattaacggccaagaccctctaaaccagtctagagcccgagtctatataaatcctaggttaatacacggaaatgtgagtatgaactaaatagtacagaaagatataagaacaatcaccggccagatataaaacaaagtctggggatatgaaacaccggggccaaagcccaaaagaacaaagacgccgaacattgatcccataaggctgagtggagagacgagaaaaaacgtgagaccaaagatcaaccaagaaatgcaaatctaaacattaaacaaaatcaaaacgaagagatcgtcaggtcattaacccatcaaatcctaccttccacgcttgtcacaaggatgaacatattttcttcctctttggatccttgagatccaatcaatgccaaatcactctcctctctcgattcttctcatcaacgaatccctcatccgcacattgaccacaccaccaacaccgtatgcaggaacaatcttgcccatgcgcgcaaaacaactaggcacataatcgcgacgaattcgcgccaaacggtctgtccagtgcaggccaccggccggctgtcggttatacagatccaaaccgaggaggtgcatgggtgtactagcgaactgcatagcagcggggcaggcaaattgcgcgatgctggatttcattgttgggcttgaagcgaggaagtctgggaccgaaggggcgatgagggcggggatattgaaagaagcccagattgtgatgctgtcgcggagacagaacagggcataggagacttttggtatttggaggtttggtgctatgggtgcagagggagcgcatggtgcgcgcagagcggagctgtacttctgcgcgactggatttgtatttacggtgacgtttgattcggagggaggagaggcgccgaacattttggcgaagcgcgcatctttgtagacgcagattgtcatgttgactatcgttgttgcgaagaacttggggaggcctgtgtcaataacgttatagggctgatggtgtgttgttgatcggagggtgtcgattgcgtttgctgtgaggtaggtcgaggtgtacagggtgtagatgaggatgaatggagtgctgaagaagaagccgcaaggtcgagcgaccatcgatcggagcccattgttgatcgtttggcggattgggaagcctttcgaagccttttccataattgcactagaggaattagtcttcttttcggtaatagcacctaagaactatcgtaagtcacttaccgatcaatgatggtgatcaatggacaggtcagcgcaccggctgttgctgcactagcgacatcgacaccgattcgcttgcccaggtccttggtattccatgttgaagctgtggagcgtttgcttggtgcctgtccttgacattcctgaccctgttcctttactgtggccattgtaaatattgtatcttgtacaacagcatcccgattcgtgctcatgtagtatagacgagaaacaagttatgcattgagtaaaactgtacacatgataaggtcaaatgagacaaaatgaattacgaataagatctgggggaagatttatatctatcgttgatctcccccagtttcggacgacaatgaaccggccgcggtccggcgccgaccctccgatgccggcctagcttgtcggctaaacgctgttccgttttatacaggcaggtgtgtgtatatcattgtttttgtgtacattgccaagatagatacaatgaactataggtttgcttcattatactctgactctcattttaaaatcacccaacgccatataccaagatcttaactacatatctagcgagctacaataccatccatagtgacatggaccgctccagcttgaaccaactgagataaaggttagcagaaattcgacttatgcaagggacacacataatacataccgctcgttgcaagtcatcaatcaggtcatccacatcctcaataccaacacacaaccggatcaagtcttcagggaaagcgcgctccgcccgtgtcttcgcatcaatgctggcatgactcatacggcacggcatactgatcagactgttgacacagccaaagctgacactgatagcccagatcttggcgctctccacaatgcgctcgctaatggccgtgtcaccggtctcgaacgagagcacagcaccggcgccccgcgccatggacttgtggagttcatattgcgggtgggaccgcagaccggggtagcgcaccttgaagccaagggactcaaggaactcggcaatgcgctgcgcattgctctgctgttgttccatgcggaccttcaacgtcttcacgccacgcagcagcagccaagagtcgaacggcgacaagccacatcctgatgcgttgatagggaagtataggcgttctccgagctgcaggtcgttcacggcaatgacaccggccatcaggtcgtggtggccggagaggtatttggtaccactctcgtagactacatcggcaccgaagtctagtgggtttaaaagaaggggagacatcatagtgttgtccacagagacaatgcaggctgggttggcttcgtgcgcggcggtagcaatttttccgatatcgacgatcttgatcagcgggtttgtgggtgtctcgagcagcaccatggttgtcttcgagctcaggacctcctggaccttctcaacctgtgtggtatcgacgtggtgcacgatgattccaccgttggtcgagaggaacttaagcagacggttggtgccgccgtagaggtcgtcaccagtgaccacctcgtcaccgggacggagaagtcttgtgatcacgtccaaggctgccataccggaggtcaccaccagggcgcgccgtgccgacatgatcttggccaagtgacgctcaagatgtgtgcgagtggggttgccggaccgtgtatagtcatactctccaccgccggcgttggaggtttgtttgaaggtagcactctatgtgataataatcagcatttatgtccaattggaagtaatattctatcaccgggtgtggatatgtacctgatagataggaacgctgctggcattgtattggtcactgccctcggtgaagaccagttcggtggcaatattgtaccggcgaccggtatgagggctggacggggcaggggaaggtggaaggtcattgcctgacaggtcaacctgagggaaacccttctttacaccgctggatgaccccgaggcggcattgggaattccggatcctgacgccgacatcgttgtagcggggcagaaagacgggagagagagtgtgtgtgtatatggagggtaattgaggtgaattgaaagcaaacaagactcaaaagatgcgaatatgccgaaagagaaagggggaataggaacaaaaatcaaaaagaaaccgaagaaaccccaagcagttcacatcttctctccccccggaccaagctgactcgtccacgtcggcgctgattcgtcgagccacggccattgcgatctcgtcatccgctagtcccgattaggcatgcaggtatgtggagtttttatgagtcaaacaatctacgttgattaactaactagttcacgaagtttgttagttatgtccatggtgattatggaagagttgtacatagattgagagaggcaatgcccaatgtgaaaatggagactttaatatcaatgttagtatagcttagctagacatctcaaggcttgcttaaatttattttgatggtttccatactgctagcgaagagatatatcaatcgaaattcaattggaagctatgtacggatatatgactattatgactagccaactactctggacatactctcgttagtcatcgacttggcttgcccaggtgcccagatgggacttcccacttttctcctcatctctacatatatctatccacttgcacatgcctctactgagtctggtgtctggaatctgaaaattattcaagcctcttcaataccgtagagaggaacaacaaaaatggcatcggcatcggaagcggcattcgcctatcacgaaccgtcaatcaaaacagtcctcagctataccagctttctcttgactctgaatatagccaatacctgtctggacaagcttctctactgtggttttttcggccaactcttcatcggtgtcctgtggggcacacttggggcacaatggatcgatcaagagacagaaagagtgatccagcagattgggtatttaggcctgatactcttgatttacgaaggtaagtgtgtgacattttgtcaacttgctggatatatctacttacaataaataggcgggttgtcaacctccatccagtctttgaaggcaaatattctactttcaactgccgttgccatcactggggtctgtgtcccaatgggcttttcattcattcttgaggagcttgcttgtgtcggccacccctcttcagtccttcgctgctggtgcagccttgagcgcaactagtctcggcaccacctttaccattctctcaaccacgcagctgacaactacaaggctcggcacagtcaccactagtgccgcaatgctagacgatgtcgtcggtctagtcatggttcaaattatttcaaaccttggcggaagtgccacctcattcactactgtgactgttattcgacctgttcttatttttatcgggttcgccgttggtcttctattgctgtgtgcattctgtttacagccagtattaaagaattgcttggttgcaaagacaagttccctgattttatgggaactacagaatttgctttcctttcacagacgtgtgtgctagttggcatcgtggcgggtgcaacatatgctgggacttcgagcctctttgctgcctaccttgctggagtgattgtctcttggttcgatgggctgatagctgaagcgaaaacacaatttcccgccttgcggtctgctgaatctcacgggaaaactttgaacgaacaatcacgcacacggaattgcaaggatcgtactgaagagacaccctcttcgcctacgcaacctccacaggcaaccgaaataacccctaatgatacacctacaggtgaactcatatacgccaaatactacaaagagccggtgaaccgaatccttctccctcttttcttcgtgggtacttccctttgatttaggaaggggcatactaacactagtaggcatccatcgggttcgcaatccccataaccaaaatgttctcaggccaagttgtatggcgtggaattatttaagccatgctaatggcaattagaagaatgatctggctggtgcgattctctccgagccctgtgtcgcgtctggtctctatcatcaagaagccatctacatacgcccatttctactgtttaggtccttggactgccagcagaaaatcaaaccaaaagaagaaaggcccacaaataccagcgactcaagatgagagcgcagatgttcccgccccggataatgccaaagacgagtctcagtcaacgaacagatcccctgcgcccacttttcgccccgattcccgtatctcgctccccccgaaaccaaagtccttctacccgccttctatcctgggattggcaatggttgcccgaggcgaagtgggatacctcattgcttcaattgccgaaagcaaagggatattctccaatgactcttccgaaggactatctgatatctatctagtggtcatctgggcaatctccctctgcacattgatcggtccgatcttggttggaactctaatcaaacgtgtaaagaagctgcaacagtcaagggtgaatatggggctcgatcctttgggagtttggggaatctaattatctcggatacagtgagcgacgaccatgctatattgaagcccacaagcgataccattggtttaatgacaataatcattctgatatgaatggtatcatgctaatctccaaaaacacagccgttcagccacccatctccataatccctccattcttgatatgagccatgtcgcttcgggtaatgggatccttcttgtcaaaagacacctttttgcgttccgcaggagtccaagacgtgatgtccttcgaatcaccacccagatgcccatcattggccttcttcagcttcgctaatacctttgcccagccccagggatcattggcattggctgtggcctcgggaagctcaaccgtctcatcagacgacttttcgtagcgcgggtggttcaagccatgaattgtgacatcgtgcttagcagcataagcctcaatcttcgcgccatggtcgccttggtcgataccgtactctttgaaatcaacactgaagcgaatgaacagaccgatcatggctccgatgttctttacctccgagtccggcttgaagagcccatttcgctccagagtagcaagcatagtaaggaacattgtaccgaaggcgataaacaccgcattcacggtctctccgtcatcgcagctatttattgcacccgttagcgttccgtcgacacctaatattctgctcggagccagtgagacaaacccaaccatcggcatgatagcatccgtttggaaatacagccccgtcgcttcacagatggcccactgcatcttccagtcaccagctgcctcgtcaaaatccaggagcaggttctccaccaactccataactgcatatccaaggaagtcattgtagacatacatcccgaagttatccgggtcgcgtgcgatggtaccttgctgcagcgtaatccatttagcgatgccggcgtttgtgaagatccatttctctctcgggtgctccgaagcaggttcgagggctgtggctttgtccgcctcctggtatcagaatcagccactatcccgcactagagaatggtatttctctcctaattaggaagtcactaaccgcatcatctttcttcttctgctctataagctcctcatcttcctcgtcctcatcctcagactcatcgtctgtgctttccgtcttccaaggcgcgcgccccagacaaatataggagaaagccttgactgggtctcgggttcgcaatttgaactctgaagccgcgtttcgggagacagagacgggggcccatcgcttattcagttcgcgctcggtttccatgtctacttcagagctgtttgctaggctcttggacttttttggaccactagcggcggactcggttgattttctcttgggaggcataatggaagatgatgaaattgaaacaacggcatagatagaaggtatatcaagttctaaattgtgataggttgagtgggcttatttaggtaaatacgggtgacgcgacttgacgcgtcgtggacacgatcacaatgagagttgacacctcaatttggtagaataatatatttgtacaggtatgtgaacacaaagaacataatgaacacaagcaattgaaatctgtatatactccaactccctctggatgccagtccatgaagtttcccgaatatgatccggatcacagaacaacaacaaacgtaagaaaataacgaaaagtcccaagatgtcactatgaacctcgtccaaggaaattcataaaccagaccgtcataaagacagaatagtcgagagaatcccacaacgccgcagccgaatccaaaccattttgagacagaaaaaaaaaaggaaagctccaaaagatgacagtatataccagcataacaattagattagagtctgcgaagggagcccggttatcctttgtactcgaaagcccccaaagtccactctcgacaggtaaagtgtgtgtaacagcatagaaacgaagcaaacatactccgtgattgtttacgccgccagatcgccaaaaccgccgttgatgccgaagaattggaacctgtcgcgtgttagcaaaagaatatcattaagaaaaaccatagaatcgaaagttcttgggatacttaccagtcctcgacatttagcgttgttggcgcagtcggcccgctacgggaactactactccaattatcattgtcctggctagcagcgtccattgcagatccactcatagtgccatcgagactgtgcataggcggccaggcttgctgatgctggccctccatgccgaacatctgctgcggcgggttgggatgcattcccatcgcgcccggcagtcccgacattatcggcgggctaccatgggagatagacatgctacggcccgagacgggctgcggctggttgttcaccatgggactagggcgcggggccatgccagggggcatttgggatgggatctggagggatgggtcgactgcggtgggctggggtggcgatgtcaattccgggaagaaggcggtgccatctgggaagagttggtcgggctggaagttctcccagagtgagggggagaggttaggagaggtgcgggttactaggaagaagtcggggggtgtggcgggtagagaaaattggccgttgaatggggttgtgggcctggtgttggctcgggaattacccgtgccggtcatgggatcgtgaggaacgcggtgggtgtttggtgattgttggccgccgggaggaggttggtttatttcccgggagggagtgacagccggtgtctggggccgggagcgctcatatgacacggggggtgtaggcccgccaccatttggcatgccgatatccatgtcatcaaatttgcgcttcggcggatcctgcctcttcgaggaagatgattccccgtgtcgcgtccgctgatgtctccggcctgcagccttctgaagtcgctcttccattactttgtttccgaggatagactcgaatagcgtattcaccatctttgccaccagccagacctttgacacatccttgagggctaacatgcaaacattgattctttcctggcaggtggccacgatcgaaggaaccgaggagcgcatttggtatacgtgcatgatcaaggctgagaacagactgtagacaatgaaggcgggcgtgtaccggatttccccatgagcctgtaggttctcaacgatggaggtaatcatgcctgcagcttggaaggcaattgttcgcgatggataagccatttcttcgaccctgtagttgttgggtgcggacgaggcaggcggcatgtgagccctgtgaagaagacagagtgtagtatagtaattagagtgcaagagagccgcccagaaatgatgccgagagcgttgccagcatacttctttgggacagttctgcagccaatcggcgagggccatatccgagtgggtgagatccattgcattcattcgccgtgactttgaagccacagagtactgctgcgacagaaccaagcccatgatctcgcatagcttgacatactgtaggaagaactggacatggacagggtctgctgggtattcggcgacaatgtcgagctcatcctcgatgaaatcatcttccgtcaccatctcaacatccgagtcatctgtattgattccaatcggccgtcccagtgcgacagcgacagaccgatcccgggtgaacagggtccaccatattctcttccagagtcttttgtctggtttgttaagctgggacatttcgacgctgcggtgcattccagagccctgtgctaccaccatagcgacccgtgtccagtagaagacgttcttcgtaacgtctatgactagtcagaaaatccatcaggatagactagtataaattatgaactcaccttccggtccctcccagtaccaacccaaaagtactaatgcctgcacgatggtgacacggtcatcctcgtagttagcatcatacagcgccttggcgcgtttataaaaggtcatagccgcaggggttgtcgagccattcgcatccataagctgctggttagtacagactctcgatcctgccagcagaatcgcctgcagtagtagcaacgacggcgggtttttggggtcacggtagtgacgcatgaagcgactcttgttgataatcggcacgacgggggccacccatttgaagtaggcgtcgaccaactcatcacacagtggtttaggtgggagcaggaatgccccacgctggtgcagaatatcgatttccaagttgtccaggtccgtcaatcgagcgcgggatcctctgatattaggtggaagcgggtagtgcacgacatctgcagttccatggcggtcttgaaccagaagagacagatttgacgactcgcccaagtacgccacccggccggcctcttttatcggagcacgggcaaacttcggcttcatgaattgggcataggcgttattggcggaagcttgttgggcagcctcagcctcggaaagggaagtattgggcatgccgtcgacgcccatgatgttgtttcggtacccaaaggcattgctcttctcatccaagtccgaacttttctccttttctctggatatagagaccgagccagataccgaattggctggctcctcagtgacagtgggtcggaagtgagaaactgcagcgtcgacgaccgaggcagtttgtggtggactgtcctcatactgactatcttccttgctcttattctgattgttcttctttcgtttcggagacgggatcttgcactcgatagagaaagcgacacaattggtgcaaggcaccccgagactggctgcatcacatcgaacctgcgtgacgggaatggttagagagtgggaaaaggggcgtgaccgagggcaaacccaccttgcgagcatgacatgtctaattgaatcgaaaagagaaacatcagctacaatttttcaaatccaagaaggggagagagaatgtatcgcgataagaaactgagccgaggtgcgttgaggacctcggccccagagtcgcgtctcgctagaaatctagacgtacctcgcacgcgcgtgatgcacgttgtctaagattagatagaacgaattagcaagcgcatcaaaatgcttaatttgaagaatctcccttcaggtacaggggaagcgaaacgccgaagaaaaccctgtccctcatcttgctttgcgcccgcacactccccccgcgacaatttatcagaccagaacaccgtgtcaccaatatcacaatagaactaaatggcaccgacggcacagacagcaaaaagagccggcttaccttctgaaactcaacggttggccttgtggaccattgcgcaccgtaatgcccgaagtccccgtcgagcccgcgttgctcggagccgggctggtatggctgtccgatagctggtcggtatgaaattcagtggtactcatggccacacagtctctccatccaggaattcagacttggtcgagtcggagaattggggggatgcgctcggaggagaaggggaagtgatctgatataagtcgaaccaggcgcacgggagtacggggtacggagtataaaaaggataggaaatagaatcttgaacacagcaaagacgccacgcgatcaagaaaacagaacagaaaatcagcaaataagaaaaaagtaccgggagagggggaggaggagagaggaatatcaaagttggggtgaagttggttgtggcaatatcaatttcctggtggagttcccatttggtcagcatttatgtttatgcattggatttacactggtttttatattcttatgttacatgtatattatatccttataatatgaagtacggagtactatatatattattcccttctatttcctactctctgcgttatctaagtaaaagatgaaaaggggtcaaggtaaccctaagaaccctgtactaagtccatatggcgcaggggttcacaccgaaccctcattaactcaacgatatggtggaatgcttctttgtgggagacaggaccactctacaagacattctatctattggcaagcccgggaggagtataataatctacatataggtgaagtatataactcttgaagtgagttcccccaatccctcaattgcgaatactttcaaggcatcccagacgctaactaaacaggaccctaattaggcccactgtgtggaaataccattgcttcagcctcccttcgggcttggggggattgtcccgactgaaagattggtttttcggtcttcggccatgacttgaaagaccccagatctctgcattagccccacgcctccaatgccgagtaaaatgaccacggtcagagcctaccgccacgcgggaggatgcggaggtatggaggggagttgacgcggtatactctcatgtcgggaattctgctcaggactgagctcggagacaatattcagtcatgggccatattggcgggatgtgcggatatatatgcagtgtgacctattgctgccctctggccaccgcttaaagtatacttgtataggggctttccagactatactacgtaaatttgggaattctcattatagcatgcgcgagtgttctgtttcagacatattaatcgagaaaggtactccgtagtgtgtagttgtaggtgtagatcattacagccgatggactcaaactgaacgatatcaaagtcaaaacggtgagattgcggggaggaaggtaaagatggggacgaaaatgacctggggagaagttgcgggggaaactccatcgcgtcgtgagctactccgtacgtactccgtgaatcaatgtaggtttttcagaggacttgacagaggacttgatggacgcatatgagcccacctgggcaagcttgtgatgcctcggcaacttttgagcttcgaccaatgagagtgcccagttggtctatttccattgaattgatgccccactctctgtcgctagaggatacatcatcatcatacatgtaaaaaggacggtctcaggcaccaagtcttttctttactaggcccattcgccggagatccccgggaagaaacggttatgtcatggacaatatttcgcggattgggagtaaatggaagtccgtcggtgagaaaaacagtttattgttgcaaagtgatatacatatcagtcaaatcttcatagagtaggtagggtctttgaactagtgccttttatagtcaggcggaccataaaataatatacatggaaaagaccaattagatatgaatataaccagccctatgcaagtgatatcgtgtgcgcagaggggtccctagttgcatattccaactatgaccacccattctttcctgatttacccttgcccttgcccttgcccttgaatttggactgtttggccccattagattggggtttcttaggctctttgtggtcctcgtggccacactctgtgatttcttcgatagtgtggattacggcatccccaacagctgtcgtgggggcgaagtccacaccgctgacaaattgctcactgaggaactccagaccggccacgaaggtgcagagggcgcttgcaatgcagaaatggctaatggtcatgccgatgtcaagccaggagccctcgtcgcgtaccatgaagaagaagttgagggtcatgatgtccgagatggccatgacaaccatgaagagcgcgctagggggtacctctaaacggcggttaaggatacccagattggcacttataatagcgaaggggatgaggatttggagaatcaagagcgcgccttgggcgaaggggtcgaagacggggataaggcgacgaacgctgtcgagggagaaggtcgagatcgaggccacattgccagtgctgaagaaggccgattgtaggaggaaaaagaagaagagtgccacgcggacatcagagagagtaagggcacggtagtagaaagtttcaccgttgacggtcgtcacgccagggttgttagctttcttcaaggcacctgtcgtgtggacataaatggcatgttccaggcgaacccatgtcacaatggtcatgcagaatacaaagtagaacagcccttcccacgagattgtgagaatgataaatgttggtgagaaggttaagaagatgatcatgagccgatgcagatagtggctattcggatacaaacggtggaagaatggaagcgtgagggaagtcactgaggttcggttagcttttctcggcgaagacatctcatgatcctagaacacactgctgtgtaaacttacctagcacaacccatccaacaacgatatttccgaaaggcaggccttggcgggcctggagagaaagcacagatgatctagtgactatgacggcaagaagaaccatgccaagctgaattcccatgatgatccgcgagccaacacgaccaatagcatttggttctttggattctgtgtcacgatgtccgaggatagcatcctcaaacagcaaatataagataccagtgaggaacatgagtaaaccgccatatgtgctgtgaacagattagccacatggaaattgttgccgtagaaagggatctcacattgtatcaaggttttcaaccttgattactggcagaagagtgaacgaactcatcaaaccgcagccaagagaccaagtcgcagacaataacggatggctgcgaataaagctaaagccatggataacaggccacaatgcacccaaggcaaagcaaacggtgaagatttcgcggtggaaatatgattgaaccattgcctccatgaccccgagaaatacaagtagctggagtccaaacttgaggtatccagtgaaggagcgcacatggcccaatacaatctgccgaccggcaatcagagccttgcggcgtgcaaaaacctcttcccagaaatacaccggaaagaatgcatagaagtagtagcgccaggatgagccctggtaaaggaacaccgagaacaaggcgaccaagatagacgagaagaatgagatactcgccgtcgtccgatgtgagtctgatgttccatgcaagacgtgcagatcaataaccgtggttagcgcatacgcaatccaacctaggtatccaatagagacgatagtccgtaagaatagccagtcatatgtttgtaggtagcgcagaccctcgagagcaacgcgaagaagctcggcagacaccacaatagcttcctcgtggtcaccactggagatgagtacctcaattcttgccagtctgccttcaatcgagttctcgtggtagcccgctagaggatcataaggtacataccggatcaccgcgtgtctcttttgctcctctttgacgcggtacatctccagaactgcctgggtgttggcaagagcggctaacgccttttcctccgggctcgcattgaggtagtctagaggcaattgaccaacggagttgacagggaagtcaagaccgactagataggccatgagcgcggcaacatcagcctgcgctacatcgtgtcggcggacctggtcgaatccccaatccgccgagaaaccatcttcgtgacccgctgcgattccgctagtggagagctggggctgtgcgacaccagatccccagacaaccaagggtgtccgcgtgttatcgggatgaccgtcaccatggctgcccgtgtcactcataccatggtctgcggtgaacacgaacgccgttttatcatctccgtagaaatcttctactaactttgtgacggcctggactccttgatccactaccttgatgttgtgtaggtattcgttcgagtaaggccggaaagagtgaccggtggtatccagtccaagcaggtggaggaagaacaccaatttgtcgtcccgtagtttccggtccaattcagggtcggtctttgccgattcgaagagatcatggaccttggagaatacccaagtatcaagatgcgtggcatcgacggtgaagtcctccgcttcttcgctgtacatctccgcatcgaccctccccggcacggcgccctccttgaacattggcaggatatcgggactgccccagctccaagtatgtcggctctggttgaacacgctgtcgaaattcaccgggttcatcttccaccccgtggtgactgaggacacatcctcataaagacctgcgataagcgcaacatggcctggtcgtgattcagtggggacgcgagtgtgcgagacaccgaatgttccgtgtgagaggaccttcgagcggataaacggagacaggcgaatcaactcgttgttttctggatcggcgtcgggggacgggtcagggaaagcttggaatgccttgtcagcccgtaggccgtcggcgacaaagaggacgagacgtttggcaggtgcggaggctccgggtaatcgctcgacaccatatgatcgcatgccactaacaattggactgacgaagtagatgtcaaagattgagtatgtatagatcaggtggaagaccactgcgagggcgagaaacccaacgcggccgagacgtgccatgatctatgcctcctagatattcaagcgttaaaggagtggaagtggtccactgccacaaagaaaggtagaaaaattcacaaaacgagagatatgaaggtcaaacacaacacgtcaaccgtcaacttgagacgcattgaggaacttggcggtgagagccaatcacaggcctccctttgtttactctacatagttacaacgttctgctttagcatgtatttaccggtcgaagctttgcaatatcttcacaaacctggagaaattgtaccttgaaataaatccagtattatgatccagaaagacatgtggtgctggtaaagtgggtgtgaggatttatacctccctcaagtggctcggagataaaaaaaagggatgttgtagtaagaaaatagtatctcgccgaggaaatctaaattcaacccgaatctcaacagactagtctatggaattatacgcttgagaatatgagtagcattgaggcgagaacttgaggtgccctgcaattgatgtgttgaaggagaaccttgcgaaacgtgtttcaccgggcgcaccgacagacgattaaagatacatacaaggtaggcatacaagcgccaagtgtgtagcaaccttggaaggtgaatttgttgacattaatgctattaaggatggaacaccatgacattcccagccccgaaatgaatagattcctagagaaacaccaacgattgacatgtactatcagtactgctattgcgctggaagagaccgccgctttgtgagggcatcaatgactcgcgtataaaacttggctgcttgtccgcggacgaaagtgatgtctacggtcaaaaagtctggtagcaggttgaccaggtcgcgatcgcggttagcgtctaggtgaggcaggtattggaactcggttttgtcgtaatcagtcgagacctttggtacgactagatggaagtgaagagctgtagggaggttagaaaaatgcgcacaattcctaggaaatctagcaacttacttccattgactccagtctggagacaatcgtataggtaatctaactctctgttcttgacatcacgaatgatcaatcctgttaaatcgctgtatagatcttcttttaattgagcgagctgtgaagcctgcgccgcttcggcggtggcagctgcattggcacgattggcggggccgcccttgatggcactgccggggacctttgcagccccctcgagactggcagctgtgttccgcgctgcggcgagcttggtctgcaaggctttgacttcagactgggcagacgcaagctgtgcttgggcctcatcggcgccagatttgagtcgagccaattcaacatcacggtctttgagttgcttctggagtccacgggtttgaagtcctagctttcgctgaacatccaattcagccttgagcgaagcaaccaattcattcgatgctaatgatgtatcagttcatctggcctagtagctataagacaacagaagagcatacctttagtaacggtctcactctgctttcgcagtttctccatgttggtgttggcttcgacaattccaatctcacgtagattgcggtatttaatctccaaggcatcatgcttcttggtcagttcgcctagccggcgcctcagctctgggtctccaccttgctcggcgtcggtgcctccaagcttgcgtttacgaggagaagaatcttgtgagttgcgtgacatggatagccgagagcgagcgttcttcacgggggacattgatttgcgattatatgccggttccttgtgaatggcagtctcatctccaagctccgttgcgggttggtcattctgttgagaatcttcgacttcgggttcctttccatcccggctcgttgcacgagcgagagggctgggctcttgctctgtgtgagtttcctgaaaactaatatctcgagaaccgctcggggtaaactcgaattcaccatctgttaggagctgtgtgctgaccgcacgaggtcgtcctcgactgcgtgctggggcagctctcgcggcctcgaccggctgcttctttgtattccttgagacaagtgagtctccatcctcctgtttgtcttcatcttcctgttctggtaccatattctccgcctcagttgcctgcacaggcgtttcagcgtcttgcgctgcacctctgggtcgtcctcggcgggcgggctttttgtttgtagggggttctggttcggctatagctatagctccttgctgctttcttgttcgagtagcaggtttgctagttttggtctcggtcatattctcgtttgaggtacgcggtctgcctcttcgttttttggcgggaggctcgtgggtttctttaatttctgcggcttcgacttgcatgatgtcctcatcatctgagcctaacaggccagagagtttggggggagctttccgtttgggcattgtgcagctaatcttggaagtataatcattgtttgatgacaataattgcatactcgcgggacgcgcaccgacaacaacacccaacaccgccttctctacccgacatgtgactggcatccccccgggtcccgcgccacaagctgccccaatgattccggcgactcggctgtcttgtcttactcctggtggacttcaatttacttttactgctctttaattttttgtttccacttagagattcttatttgcgccattattgcgctatatttgatcattcccttaccgtcatggcttcagctggccgaagatggcagcagttattccaagaaatggtgatggttgcaggcactgtgagaaagttcctgtttcagataggacagaatgcttctgacactattatagtctgcctctgcatatttcctcattcgataccttctatcacgtcttgatttcgacccagagagccagaagaaggaggaacaacgacagaagtccgctgctattatacgtcgattggagggtgggaatgaatcagatgatgagactccacggaagggtggtagacgggggaaggggcaacgaaagaaggagcttaccttgaaccaatacgaacaagcgattgcgatggatgttgttgcgccggaggatattccagtgtcgtttgaagatatcgggggacttgatgaaattatcgaggaattgaaggaatcggtcatttatccactgacgatgcctcatctttacgcttccacgtcgtctttgttgaccgcaccttccggggtcctcctatacggcccgcctggctgcggaaagaccatgcttgccaaagctctagcatcagagagtggagcatgtttcatcaacttgcatatttctacattgacagagaagtggtacggcgactccaataaattggtcaatgcagtgttctctcttgcgcgcaagttacaacctgccatcgtcttcattgatgagattgacgccgttcttggaacccggcggagtggggagcatgaggcaagtggtatggtgaaggcagaattcatgactcattgggacggtcttacatcggcaaattcaacgggagagccccagcggattgttgttctaggagcgaccaaccgcattcaagacattgatgaggccattctccgaagaatgcccaagaagttccccgtgacccttcctccaatttcccagcgccttcgcattctcggtctgattctcaaagacacgaaagttgatcgcgataatttcgatctgcactatctggtcaagactatggccggtatgtctggtagcgatatcaaggaagcatgccgagacgcagcgatggttcccgtgcgggagcttattcgaacaaaaaaggccagcgggatgcaaatggatgcaatggatccccaagaagttcgtggtcttcgcacggaggatttcttctctcgcgccggtggtatcaaggtcattcctcagcctgctccattatccactccgactggcaaagtctccgagaaggaggatggagactggagtactgcgtctgaggccacatcagaagctgagactcgacactctgtgatggctgagccgccagagtaaatgcgaggtacttttggtcgccttttgatatttattctccctttatctcgcagcgcgaagacttggcgttaatctactggaaatgctaggctctgaattggtgaatggccattttgctctagtatggccgacttgttgatagaatttctgatgtcatatgtacaatgggtttggatacaacaatctaatacaaatcttgctctttaactgtgttcttgttctattcacaatctatatacatgtacgtatgggggccgacaaagtaccgggtacacataataggtggccttgaccggggaaggtcatgtactgctacgaaatatgccacgaacttgcgacgtagtagcttcagcattctctctagggctttgtattatgtactccgtctgtacaggccaagacaattctattcaattcttctagttcttataattctcgtgggcaattgtcctgctttaaattactccgcgttcaaaaggtgcgggtcgttatcgtcacacctccttggcctcctagttatcgcctgttctccttcacctcactctcttgtttcccataccttcccaaagcttttgtgttgttggaactctttactttgtattttggacgaatacctggatatatgatcaaacgttctctgccgtgctcccagtcaaaggccacgaatgcaagtccgggggtggatgacgaatgggtctctcctagatcaactctgatggcaactggtgccttggcgatacacacttctaagggggcttttattttgcatccttagacttattcgctggattcacaggaatgagttctcaaaatagctttgccaatgcttccccaagcttcaacatgctcagcgcaagcacaacttcaacctcgacggttcgatcgcgccctcgccgcttagtttcattcacggacgacgaagacgacagcaacaatgctacaaactacgcctacgaggatgatgcccagctatttccctcgggattatcaacgactcttgcgccctccgagggtggaacgactcgatcccgcggagggaccccctcgccattgtcatcccgtggagcctcaccacttccaatgagacacccatcacgtgcgaccgaaacgataaatcgtagtagtcgcagtgggccaacatcgttcgcttggagtgggtcatcaaaggcctcgtcgtcgggaggtgctgcgaactttctggactcctcgtggtcctctctccaaagcctcgcatcttcagtattggggagtgatgctgaacaagttactccgaataatgcgacaaaaccacacgcgcgaaggaagccatctcggtctgacgtatatattaagagtgcttccaggtcgacgtggggtccgtcggcaccgacggctccgcagttcggaactgggacaaaggaagagcgacaggctttagttcaggccaaaaagagagaagcgctgctccttgctgatagtgatccgatcgcaagtcgtacgctccctcacaaaagacgcgactctggggacatttcatatcaagcgtttgagccggagcacgatgaagacgctctagcctatatccacaaagtgcaaccaacggacactatcaccggcgtgacgatcaaatacggctgccaggctgcagtgtttcggaaggcgaacggtttctggcccaacgacaacattcagagcagaaatactgttctcctaccagtcgatgcgtgctctctgaaaggccggcctgttcccccaaagcctgtagatcttttgaatgacgaagaccccagggacagctcgataaccccgacggctgcctctgccgatgatacctctgcaaccgcgtcaggggccgatggaaatcatgtttggaagcatgaatcgtgggtgcacatggatgggtttcccggaccagtcgaaattggccgcgttcctcgaagagcattgggattctttccgcgtacgcgtcgaaaatctatatcttactcggatgcagaacctcccgatttttaccgagaaacaatcactcctccgtctcctaccggatcaccacctctaccttcatcatttggtatactgccacgaagtcgaccaaacggcgaccaaccccaacccaaaaccacacaccccattcgtcctcagcatcgccgccaacgcagtagtatccaactgtctggcacaggggtgggaacacttgaccccacctcgactggtccagggcctgcgttagatgggttcactcgattcttcgcgcagcatataccgaatctcgcgcctccacaattcccggacaattttcggacgtcttcctttgactccacatccaccgtcgcatccaatgcatcgactagtctcgagaacattggcggggcttttgaaggatgggttcgaaaggtagcaacacgcgctaaggccggcattaatgagcttcagcaaggagcaaccacccagcagggtagcagcaggggtcgcaatatgtggcggatggatgacctgattgagcttgacgacggcttagtggatggtcggaactcccccagcccattcaaaagtgcatcgcggaggtctgagttacagggcacctcatcctcatcctcgtctaatcaatataacagcccttcggtggcagcgagcaggtctcgtgcgactggatttggctctggctccggttcgtccgcctatggcgagcgggtcaaggatgattaacgtgtttgaatttcacagcgtacataataagagtctccctgtgtatccttcggagttcaagatttttgcatttcttttccttcatgcgcacccccaagcggcttggtgcttttgttcccactttggcgttgccatttttcaatgccacgtcacaccaatatttgacatcgaaacatcgcatgcatgagaagtgtggacatgaagaatctcagccgctatttcgtcacttgcatacagcccattgacccagttgatattcgcccaatgtctcaaccaggttgttgcgtgacggattttgggtgttgatttggactggacagaagcatgctccttgtcatttcttctggcatgttggatgtatagtaccttcaacgctcttgttgctactgcagcgcttttttctttatcacacctggcttccagcctaatgcctcatcatctagaacaccatcttcgaaatagactactcgctttgtatttgggcttatttttctcttcttttgccgtagcattaggggaacttctgtaaaagcacagctaaattccgaactggaaaagatcagtcgctttccccccttatgcccggtatttcctcttaattttcccacctatgagcacgcatggcaaagatcacagctcattccgacacgttgatggtggaatttctttagttgtgatacgatttccgggaaagagattgtctaattctccatggcctggatttgagaatctactttgcagccaagttggcactgaacaagctctataaaaaaccccttcaactcttgtccggtcagtttgagctcctctcgaacttcgaaaatgcggtcgatgacaagagcctcgacggtcctttcgaccttattcctctctataatttccggaacaatagccaactctctctcatccaaaacaacgggtaacacagcgaataccccaacagcaaccctatcaataagcaatcaaagcctaaagaccatcttcgtgggccgctctcttccggaattcaaccaagatctttttctgggcatcaagtatgccgacgagccaatacgcttcacaccagtcgaactcaagagcgactatgcatcgaaggataatgactctggacattataatctatcaccagaagaagtcgtcagcgctacttctaacctggtatactacaatgctatggagtacggctacgactgtcccgcgtatggatccgataccaccgacatggtcaacagtggtcttatcactttgaacgaggactgctttaacttaaatattatccgacctaatgccgacgagagtaacggattgcttccagttgtgatctggattttcggtggtgggtgggcacagggcgctactgcggatccgaggtatgttggtcgaggaatatagggctgggtacgaatgttcataccttagaaaggtggccgatggctgtggttaaccttatgctacgctgcctatagatataatatgagctatatcgttgaacagagcgcattgaacggcaagccagttctgggtgtttctatcaactaccgtctggcagcattcggattccttgactcggaggaagtaagggtagtgccaatatatagaaacttggatactgaggattcttgagattaacttggactccaggtcgaaggaaacaccaatctagcactgcgtgaccagcgcacggcgatgcgctgggtgaagaagaatatcaaagcgttcggcggtgatccgagcaagatcactatttggggcgagtctgcgtgagtcactggaaatattttggtataacagatgcttaattttgaataaacagtggtgcatatagtgttggagctcatctggtgaccaacaatggcgataacgagggtctttttagagctggtatagtccactgtacttcgtgccattttacgacaccagactaaggttcgcctagcaatcatggattctggaaatgctgtcgggcccccatacaacggaacagaatggcaccagccaatgtacgaccgaatcgtcgagagagccgggtgagtctatatcaaacaagtctctatcaaatgacgctgaatatactatatctagatgcaccaattcattgaataccctacaatgtctccgtgagctgccatacgcagctttatacagcattgcaaacgagggtctagaatggtttgctactgtcgacggctcattcataacccagtatccgcaaatcaactacagagaaggcacattagctcaagtgcctatcttgttagggacaaataccgatgaaggtaccagttttgggacgactggcacaaacaccgttgaggactgcatcaatgaattgactagtacgtgttgtgtatagcatttttaagtcacatcgtgctaagcgagtagcacagcatccaagcgttggatcctcaaccgtccccaagctacccagctgctgtcctactaccccaacgtccccgccattggctgcccctatggctggggaaataccatctggccctcgctgggactcatgtacaagcgctatgcatccatagccggggatgtgaccatggtagcgccacggcgcatgttagcccatcgaatggccagcttgcacgaggatgtatattcgtacagatgggatgtggcagcgttaaatggctcaacaacgattggggtgcaacatttcgcagaggtatgtagtaacccacctagtcttagatacaacctacctagctctctggtctgcaagatagactgacgcttgtatcggttatacagatccctttcgtctttgcaaatccagtgcaggccatcacaccgctagggtccgaccctgagcgcttgaaactggcccaaatggcagcgcggatgtggacatcattcgtggcagacttagatcccaatggacatggtggttagtagaacacacgtgcggctagaatctattgtttggcatctgacttcttctttctagtgccggatattgccaaatggcccaagtattcgtcccgagcgacgaactttgttttccgcttaccccgaaatgagtgttatgtcgaggctgacatataccgcgtcgatgggattgattatatcaacagcatcgcgcggtaatgtgggggtgaaggcaagctaggctagatcatctacgttgtgtgcatgaacaagggaaacagatggcagacatgtgttagtccaattgactttcttcgtcaggtaacgagtcaaatcaattgacagcaaagagaccaggcgttgattttgttatccaagtagcctgccgaccctatgagacgagcaggaatgatcaatgtggttctttttctcgtttggtaattgcacatcttatatctagccgaaaattcggaaacatcggttgatttaaacactcttagtgccgaccttgaggagctcgacctcgctgtgagcagttagtttcagttgtctcttataccttcgcagcaggactgagaaaagagatgagttactcacaagacaagcttagagttggcggggatcaggccggggaagccactaagatgattgaatatcagcacaactctcatagagagaaccaaaggtgcatgttggagttgtgagggattggaagcatccgcaaaaatgatggattgttgattcagcattgaggttggttggttggtacgtaccggtcgccatagccgaagtcactgtcgagaatcgaatattagcagtgttcagtagatccgcgcaaaagtgcaaaggaaagagaaatggcaactcacgggctgatggtcaggatggccttctcgccgagggacatctggggaacaccctcgtcccagcctaattattaggttagcaagctgaagaaatctatatttctgacacgagactcagtcggggtatattgaaacgcaccgcggatgagacggccgacaccgatgggggtggcaaggggcccacggccgggcttgtgggaggtatcgaagctgagggtatattagcgcgtgaggcacctggaggtggtatggagatttggcttacaggctgcccatgaagtggttatcggccttctcggggtcatacaagcagccggtgtagtggatggcaacgtgctcgcccttcttagggtagtcaacaccgttgccctcgaccagagtcttcttttcgacgcccattgtgaatgtaatagagatatatgtaggatgaatatgggagttgtgaagagaagaaacaaaacaggaagacggggaaagctcgggaggggcagattatccacttttttcctgggcgggggacgtacggagtggaactccaagtgtctttaagacgaacaacatggttgctttactgcttaatttattggctagcattcagatcatagactgggtatccatatatttactcaatggcaacttctggtgattttcagcaatagaataccccgaaaactcttttggaactgggatgtattcctgacacggttgcttggaaacagctggaatcagctgggaatagctgggaatagctcgaatgtaacaccagggcgaaaactacaacacatagggatatgatctgcgcaagacgggcaaattcgtgggttttgcgagtgccaccgatgaaatctccctcaatgtcatgatctacgacaggttcagaccagcccttctcttggactagagaaaggatcatcctatttgttccctcgatgccccgcggaggggtaatggcggggggaacatctccgcgataaccccggggctgnnnnnnnnnnnnnnnnnnnnnnnnnnnnnnnnnnnnnnnnnnnnnnnnnnnnnnnnnnnnnnnnnnnnnnnnnnnnnnnnnnnnnnnnnnnnnnnnnnnnnnnnnnnnnnnnnnnnnnnnnnnnnnnnnnnnnnnnnnnnnnnnnnnnnnnnnnnnnnnnnnnnnnnnnnnnncggcgataaccccggagctgttctataggtatgagagtagaaatatcaaggcaagatcccattaatatacagcatagattgtaacatcatgaccaaaatgccatcttcttcacgtcctccactgaaatttccacaattcgcgtcttagggaaccgaggatcgggcacaggagatgtcactgatgcttccaactgtagataatgcagtgttgagatcccagtgcgatccacaaaatcaagcacggggcggaagttcaaagcaacctggtcgacgccgtggctgtcatcggataaacagaagcgacccttacgcgccaaaaattcctaaaatgatcaaattagtcaaagatatacaacaaagaactgcgttggttaccttgcagatctccgctttgggatacggttctgtcattcccttgcgcaacgcagctgaattgagctccagcataccgccgtacgaggcaataaagtccaagtttcgtaaaattttactccagacaccaggccaggtagtaaagctgcgctccatatcatcgctcttcagacgaatcaagtcaaaatggcccacaacaagcggtttgagttgctccagcatatccagctgtgcatcgaagtagtcctcgaatagtcgctcatccgttccgccggctttctctcgagcctgctcgtacataggtcggtcatagtcgatcggtacggtatgcatgtggtgaaccgagccaatgaagaattcaaagggaaatcgtgaaagtgagcgttcgatcaaatctttagaggcgggtcggatccagtcaatctcgaagccgatgatgattttgatctgggaggcatatttctcgcggagagagactgcttccttccagtaagcggcctcatttgctgcatggctttcttctgtttctccagattcgaactggatgattggttaattcaagttttgcagtgtatgtgttccttacgcacttcctcgggataaaaatcttctttatgacggggcatatgttcagtcagacaaaagacttgcatcttcttgctgatggcagtttgaatcacatcttccaaggagttttgggcatgaccagggcagaattggcccgaatggctgtgatgcgagaacggcatgttttatggatatgtcactgtttgtggttagcacaatattcgaagtaaataccgagttggagggcaggaataggcttagctgaattgaactgtgaacaaattctatactcacatctgccttttaggacgttcgaagaagatcaaatatgccggttacgtgggggagtcagacatctattgatagacgataaggatttcgccgcacgggtgttttatagcgcggagtaagaagtaacaattgtatgaatgcattattgattcatagatcgatactggataattcagtatacaatttcttgatcggtccttggatctaagcttttcacatttgatttctttaatataccccaatgagatgttacttccagccaccatctacccagacatcgctgaccacaagggtgcgaaacacgatcgtaccggacgccaatgatgaggtcaccgagtgaagcgcactgtcgttcaactgtcgttcaagttgtggacatgcttgaccggtacgactcaattgcaagcattgagccagaccaatcgaacccaatagcaaatcaggtcaaagccttgacttcctctaaacccgctctctagaacagtgtccccagtagctccccagtagttgcacactcgaaccatgatatcatgggtaccaggcaatgactgcttgccgtcctattcacagccttaagagaccgagtgaaccagccacaagagttgcgatgggattcaaccctaaagcagagtctaataaaccgaacaattcatccagcagccaaaacagtagcaacgacgtacgccccatcatgcgagatcgataacttcgcaaccctcccctcacccgtatccccatccagcgcattcccaagataaacaatctcaggtctccgacttacatcctcgccaaacctccctccatcctcctgaacccggaccatgacatccttccagccaatcgaagccgcaccggacggcgccgcttttcgcgccgcctcttttgccgcgaagcgtcccgccagccagcgtgttatgtccgccggcacaggtgcaggctgttgatggtatgcggcgcgtgctttgaggacttcgctgaagcgcgtgtgaaagtcgtgctgttcttggtcgcagagaatgcggcgcgtgaatcgtgggagatagttgggtcgggtgaggaggcgggttattcgtgggatgtggacgatgtctgtgccgatgttcaggggaaatgggaagggaaggggtttcattttggggtttctggttgttggtgggcgttcttgggggagttgttgtgggagtgaagtggtaggtaggaaggttgcgggaggtgttggacacctcggaatagccgttgagcttttttttttttagttgattggagtacttgtgcttaactcattaggaaattattgatcgtgtatgaatttcgcgtgtgaccattagcgtggtttcagagcatgcttgttctatgctgtttacctctacatgttctcgtttcgctttacagtccctcattgctaaagcactcccattgaccggataagcaagctaatcggagccataaagagcaatcaatactcatgccaaggtgaaagtccacagagggctcttgccaagcaccgactccgagcgacccggtgtgagattgcgtcaaagcaatcgtaccactcatctttcttcttccgcgattgatcttgctcactggcaggggaagaacaggtctgaaaagccagtgtcaagaggatatttttctatgcagcgtacacgcctcctatgtacagatcaatcaacctcatccgccgacatcccaagatcggtccgtgtagctcctcgaaaaaaccgtggtcacaaaaaaaagctccggaagggcggataaacatcggtgcgcgctagaactggcacaacttcggaggcagtttgattgaatacaaatcatagctcctcatgttcgaccgctccatcaatataagccgtatcgaggattagtttaatggccagcggcgggcttcttctcgccgccatcaatctccttcatgaagttcctgtgagatatgaagttagcaagacgctcggggctgatataagatccaattcatggtcggtagttctctgttctcggcgacggtgttggacatactggacgaagttctcctcatccttggaggaggcgttgatggggggaccctgagcggtcttgggcttttcaccaccggacacggcaagccaggaaccggcgaagatgctgccgagggtggccatggcgagctaatgagggggtggaggaaacccggtcaacttccatgtttcacaaggatccgcacgaagcgcgatggaaaagggatggcgagcacgcagcggcgttttgggagatagagaaacttacgacgtgggagccgaccttcttgccagcgatctggtagtagacaaccattttgtagggttggaattgaggtacagcgagaggttcaattggcagcgatgtggacggaatcctcaggcttgcaccaaacgacgaggtcggcacggataccgcctttcctaatatggttagacagttcacatgacttcggaacagtggatgattaggtaaggacactcggccacccggccgcatccgatatcatgtgaccttcccgaagcgaaacatcaacagtgcattggcacatgaagatcaatcacaacacgagaacaccaaaaaggctggtttgaactcgatgaaaggaagaaaccgataagctaaagctcggactcaaaacgtttgacgacgaagaacaaataatgagttcggcgccgacatcatcccgaggtcccgtattccaaggttacttctacatatcccgatccggaggataccaacggtacctcggaaggaaactaccacagctgatgctatatgtcggctatggctggctgtcttcggctgtagtatgcggttaatatgagaatctttcaataataactcgtttcatcccttgcacagctttccctcattcttctcctttattgtctacatattatatacccccttcacgtattggcacgcgaataagcgttgcttgactacataaaccatcaccgatcatctatactacatccacaatggtctggggcggtcgtcaaccagatggatcccagtctcccccgcaggagttgttggataagcctatagtccgagagaagctcccccccaaattgcagcagttggttgatcgggaagacgacttctatgatgacctctactccccatagtatgtgaagctctgatgattttgtgtttttttcttttttcttttcttttttggtccaagcaagttacagttgctgtcgctgtcgctgtcgctgtcgtgtgttcggagatatggaagggagatagagcctgaaaaataaggccggtgtacttccttaccaccccgcaaactcatctctagcaaatcagcgcaacgccgaaagcaagcaaagacaaaacagaaactaacgatgggcacctcggttgacgacagctcggtcgattccacagacacggggtatcgctatgccgcgtacgccaaccgcatccgcacgatcctcctgtccgcccatcggtatgtcgcctacacttcagacatcggcgagtccttccgtccaattgcacacccatggctcgtgcgctctgcctacactatctcctggacatacctgctaggcgatgttggccacgagggctacaaggcctatctccggaactggagggcactggctcccaccggtgaggcatacaaagatgctagccagccttcgaataatcagattatcaagggcatggcgacgggcaacatgacgattggaaaatcagccgtgtctaaggatgagctttcaaactggtcgacccccgagatcccgcttgcggaggactaccgcatggtcatggtcaagcgcgcggtatttcagagtatcgcgagtatgggattgcccgcattcacaatccacagtgtggtccgctactctgggcagatggtgaagggtgttaagaatgcatttattcgtacctggacgccgatcggggtatgtaccccgggcgaacaggcaaatcagtgaatatgatgctaacgactgtctcttatagcttggtctcgctgttgtccccttccttccctatatcttcgatcatcccgtcgacgaggccgttgaatgggccttccgtactggtcttcgtgcttacggtggcgaagcagccgtccgcccactaccaggcaagagccttcctccccgggaagaggaggaacaccgcgctgttgcggcagcaaatatctcctgggacgagtacaagactgagcgggaccgcgcgcgtgagctgcgtcgccagtcaagtgagcaggccgtcagtggtggaatttcgtcgctgacgagctggttcggaaaatccgaatcggagtcggataagaagaagaaggaatgaggtaaatacactacattgttttcatcatttgaccgaagtgcttcctttggctgcttctgtctcttgtgtatgagcgcatctctctacttattgtacacatcatttcccacactctctcatcttctatattactgatatccactggggttagttgtacacttacactcaacctttctgaacaaattgtgattctgtgattcttcattttctgtacatattccttactcatctatctcgaaggtaatgaatgccgaccattttccaattttcatggttttagatcctcaatatcgaatacctgggactcaaattctgcgtgggacagtgttcaatgaacctggtcgggtcatggcagagatcatgctgataattcatatgtgacggtaaacccagctacaaacatcaattgaccataccgaacttgatagcgtccattggcctcgatttgagagtcggaatcgaaccgcgaagatcggaactcatcaataactgtccgggggtgtctagaggtctaaatacccgtggaacgttggtcctacctagacagagtcgggttagtgcctagagaacccatggttccgaatggagaacctggggtagacccacctttttagcttggaaggcacaactttctttttgcttttttgctcttttaattttatatcgttattatcgtcgtagcaacgcccgccactggattctgtgttctttctaccagtagcatatatttctataaagccagcaagtgaaatatgagcattcacacatcatttgccacctcaaagccctccacgcgaaccgacttggtctgatactgtacaatcaaacgagccagcttcaagcgatcttctctaccaagcctctgaaccctctgacaggggttctttacaatcaatccatcgtagtcgtgctggaattccacatcagcctcccattcatatagcgggctccgctctctaaagtaataaggccggtcatgcttcataacgacctcgtacagtttgcgaaattcttgagatcttccggtcttgatatctccatttggcagtaccaccacacttgcatgccacggcatatcaccaaataggtcgccttgccgcaataggggaatagagatcttgtttcgtcccaatgaagggtgaatcgagagacggatgtattttccaagtgtggcgttaatgacggcttcatatgcctgaaaaatcagtgagccagggaagtcagactttaagaacaactaaaacacaaagtatcccaagcaaaactccaagtgaaacttacgatgagtcggttgatcatggttttcgccatcttagacacctcagccgcgtagagtgccggatcggccgcgataagaggatcaaaccctttggcccattttaaatcctctgatatgcgactgaaatagctgttgtatgtggtcttggtatctgaatttgccttcaactcatggtcaatgtcgaatctcggatcgaagtatgtcggtgacatcagtttctccctgcaggtggggacgagacgcaggtaatctgccttggtaactctctcgccatctcctaaccccagcaagttcatcagccggatgaactgtatagaagaaaaatgcttctctttggcgattttgcgcagctcaatgccatagtcgtaatattcgtcgtcgggaacgccgaccaaatctacaccgtcagtttattttatcactgctggattgatataacaaatggcataccattatatactggtccgtcacaaatgaggataagtcgtgcgccgtaagggtagacctttgaaatctcctcgcacaagtgattcaacttcgctagacccatttcttctcctagatcagccccatctcctagtactttgtcttgatttgggctcttccatggaaatgcaggtaagaccatggttatcggctggtctgcggtgatgttcatcttcagcttgtcaggcacagagtcaaacacccttccgacgtctctctgatggccatcttcgctcgaatgcaagcaaaaccgctttagtacctcgacaacctttagaggcacttcatctggagcatattcgaatctcattgtaaatgaaatgccgaggaattgatggatgggtgcagcaaaatgggggggggggggggttttcgggtgttttnnnnnnnnnnnnnnnnnnnnnnnnnnnnnnnnnnnnnnnnnnnnnnnnnnnnnnnnnnnnnnnnnnnnnnnnnnnnnnnnnnnnnnnnnnnnnnnnnnnnnnnnnnnnnnnnnnnnnnnnnnnnnnnnnnnnnnnnnnnnnnnnnnnnnnnnnnnnnnnnnnngagggaggcggggggggggggggggttttcggatgttattgttatccctccgtgtcaagatcagcatctgattattgcagtgacatatagcttacagtattttatcagttacctgcacactatataggtattcttacatgtagtagtacccgtaatcggtaaaactagaacatagtatttgccaatttctgcagggagcaggtacatcgactgcacaatgtacgtagcacctaggagtcacattttagaattcacctctcctcctcccattttctttaatttatttttctctctaaagccttcctaaacaatatgggccagcgaaacataccacagagcagtgcggccggaatatgctcgacgaccgctggttcgtcctacacaacgtcggccactacctataacgaagagtccccgatatttgttcaacaagatcctcgccaacaagatgaataccgcaaagctgagaacaatgagatccccaatgggggtctcgtagcctggacccaggttctgactggacatctggttgtgttcaatgtatggggctacattacatcgtaagggagccccgtcacataagatattaattcaaaccattgacgcaatctaggtacggtttcttccaagaatactatgtcaaaactctcgatgtcagcccagcaaatgcatcttggatcggagcggtgcagatgttcttagtccatttcctggccactttctcaggccgagcgatggacgcaggctacctgagacaatgcatcacccttggatgtttcttccaggttgccggggcattggcgacctcattcggcacaaggttatggcatttttggttagcgcaaggcgttgtcagtggaattggccacggactcgtcttcagccccatgatctcgctgtatgcgacatacttcaactccaagcgagtgatggccgtctcgctggcatcttgcggggcagcgactggggggatggttttcccagtggtcgcgtataagtgtctcaacaatatcggcttcgcatggactgtccggattatggcagccattatcctattcaacagcattataattatcaagtttaccagagctcggattatacctcggagtcctcctccctgggttgatttcagtgcattccgtgaacgcccttacctccttttttcgatcggctcattcctgatcttcgagggtatttactttgcctacatttatgtaagttctgtcttgtttctcacattggttggcggcataatagctaacatacctaacaacatctacagctcagacaatatgcccaggcccatacaggtttcaccgcatctgactcacttctccttttaatcctgatgaacggcgttggtgttgcgtctcgaattgcatccgcatttgtggcagaccggtggctgggtgcggtaaggacttgcattgcagtctccatcccttgcggtatcgccattctagggtggattggtgtacacacccgcgttggcatgttcatctgggctacagtctatgggttactggttaattgtgcgcagagtcaattgcccgctgccaatgcatactttggatccaaagacccggaaaaatcaggcacacgtgttgggatgatcaccacgatcaatagcattccactactgactggaccgtacatagcagggcagctgatcgcgttacggggaggcgattacctgtacgcgcagttgttcggcggtatttgtatcttgactggagcgttgtttgtagtcggttctcacctttcgggagcttgaaattactatccatgcatgattgtatttgaacagagagttatgccgtgtatctacttgtctaagttactccgaggatgacgattatcaagctctgaatgaggtattatatctaagccacataacacagttttattgtttagcgtgttactaccctatctttacggtgctcgtataaacataaacataagcataaaagtgaaagtgaaagtgaatgcatgtccccctttgcaaattgcctcaactgaccttgaaacatccgagtcaacgaaaagtgtgacccgctctgtttcggaatgacctccctcccatcacgttttctccaacccctctcctcacgggccttctcctccaccaacggagcattacacaaaatggcactcaggcctcttcattaccaccttccattgttcccagggttccagctgctggacgtggcggccccactggacattctcaacattcgaacgcaataccctgacacatcagccatcaccctgactatatcagcggaaactctcgacccagtctcagtgaaaccaatcccacctcctaaggcaaaatggcgatttgacctgcccgtctcaaacatcaatacagcttgtaaccagcaaatgctaccacaatgtacatttgctgacgtgatatctgccctgaaagcggggaaagttgccgatgatggcagtggtgaattcaaacctatcgacgtgttgatcattccaggtggcccggggacacgtctggaccgtatttacgacactgatactacattcaacgaagctaaagtctccaacacgcaagaggttcgggactttctgacagctgttgcgccctatgtccgtcacagcatcataactgtttgcaccggcagtcatgtcctttcgcagactaggcttctagatggactccaggtaacaacaaattcagcccgctacgatgatatcgctaaacaaacgggcggcgtgaactggcagcgcaacaaacggtggctgcgtgatagtgtgtccaaggatgcggtgtctgatggcttgttgttgcctgggattgagatctggtcatctgccggaatcactgcggggattgatgtaatgctggagtttatttcagcgcattatggtggtatcgcagtcggagtagagactgcgaaacggatggagtatcgctgggagcgagagaaggaagcttcttacttcctgtaacgggttccccaaaaggttatcaaagttacagatgggctcaacctttcacgagccaggcttcagacgtaatactcgatgcgaatggcgaatgttccctggggatggaggtcttggcagaatatagtcagccgtgaagctagagcaattttaaacatacaacatgccatccctcaaaactccagtactttgtgtcactggtatacactataatttgtcagagagcagcgggtatttgatcggtcagtctatcttcgcgcgcccttctagagacatcctggacctttttggctttgtgatgtatttctctagccgtcaaaacaatgaaacattatatcgacatgttacatttaccccggaatcttttgccataccattgattggttctcctctatcccgatcccttgtgtaagatatacctaaatgtagcctgatgcctattcgggaaaccgcttgccagatcatgcatgagcagtcagctcaacaggtatcgacttctttggctgggagagcatcttcaaatagtcaaatagtaacggcacgtcctgtgatacggcgtatccacgggcagtatccaaatgcctaatctggatgtatggaaacagtcctacttcaaagtcatgtactagtttcagcatacaagtaatcagatggtaatcaataccactatatcctgtgcaatagcatggtttttattgaataacccaccgaagtaaagttatcagaagtacaagaataacgaggaagagggaagggggaggaaggaggcggcaaatggagttttaacggcgaataaacatggaggctatgagcataaggaaccaagagcaaagttgcaatagaaagccaccagattccaatacaagttaccagggtaccacccctataaatcacgagtacattcgaataccaaatctaccccttcccaatccctagctgccattgactttcccgctctcatctaccatgagctacatcaaaatgctagcgacaacggtagtcaaagtatctccccacttagacataattcctttcgactgtatcacccccgtcccaaagaaacgagcctcattcctccccaaaccacaaccagtcgcttcaaagccagaaaccaccaccgacactcatctcgacccaccggcagtatgttccaccttagcccgcctaaaggcagaggaaataatgaacatcgtggagcgctacggctcccatgagcgcacaaccacagccggagaatggctgggccggtcatcgtttacgccgcgtgtccagacacatgttgcagccaacagggcaattcctatggttctacctgcttttccgatgaagagcaataaccgcatggacaaggtgctaggttcacttccagatttgggggatgagcttgggttagcgcggttagtgaatctttgtcgggatatcaaggctgtttacccgcctggtgcagttgtggttatggttacggatgggatttgctataatggtgcggggttgaacccttctattgatttggatgtcagatacaggatcggacgctaatatgatttttggattctagatcttacggggatttctgatgaggaggtctgggaatatgggaatcgactgcggaagatcgccgttgagaagggatatgcttgcattcagttccatcgtattatgaatatgctgggtctttacactagcgcccatatttcaaaatcggattatgtgaagctctgtggtttatccagggctgaactccatcgacggtgtgggcggccgggttttgatgtcgataagtttttgaaaaatgatgaggattatctcaggacttataatggtaagtgtgtggctttcaagtcgagctaatatctcccagctgattcaatgcaggatatgacaagttcatgaaagtcgatctaaaattcagcccagtgactaaagattgcgccggtcctaaacaatataagaggaggatcaagattatcgcaaaagccatgattgtccgcggagtggtaagtcttctcgagagcgccatataaagcgacaaggtggctaatctctaggttgcaggaatacgcggagttagtacgtcaagtttaccccgactcactgcgtctctccattcatccctcatcggggcagacaaagctctcctgtccccttattccgcagaagaactcattttccatgagcccttggcactgtagtgtggcagtgacaaccacaggggaattcataacagctcaccaatccgtacatcggcagaagttcgaccttattagaaaagatggacaaccatatttcttccgtgagagctcgttgctttttaattgggacgccagagttgattttgagcatcattatgggcaaaaattggttgttaaggcacaaaaacagattgatcaagaactatctgactcggatttggacaaattggcacttttggcaattcaacaaagaagtgtgtcttttgtctttgtatatatctgatattttgaaggaaaattcatgttcaattgctcgtgaaggtccttgaatattgttatataatctaacgatgtaacagccatggtagatcgatatctatagccgacttttaaagggttattatcgttcttaactagttagttagcccagtgacagatagcactggtaccagtatgaaagctctcgttatagcgaattacccgaaagacctcaggccactgaagggcgcgctcaaccattgcacccttgcaactgcctgtgatttcgctcttgaaggctgtgagcctccgtatctcaaagaccaggtaatagcactatttcctggcaagcagcccagatgcaacgagctggctagctgctagaggcagggactggtcaccggcgtggtcgacaaagaagtagccgaccaagcactggcggagcctcaagaagacaacgtgcatcccctggtggagaggcttatggagcgtaatatgctagtatgtataatgagcccccagctgatacaatcaatgtatgccatggcgctgagtctatgtagtaatgagttgttggaaggactaagagtcctaaatcgaacatagcaagtctacactataatttacttcgataagacaggtttagaaaaaatgagatatactcgtcacattgacgggctcacgtccacatctacaaggccatacggcacctggcacatttcatacatctgtacagaaacgcagaaacgcacgaacaaaaagcttaagataaaacacagcgagacagggagtaatggaaggagagggaggtaaggagagatagggaataagcgtagggaaaaaaagccattagctgtcaaaaaggtaccacccagatccattattaatgtgcaagtccaaagactgaatgaccaatagttcataagagagagctttcaagtggaagccaaaagtagtgaaaagatttcgtcccaaatttggttgtcccagtgccattgaaagggataaaaaaatatttggtaaacaaaagggggaatatgtcaggaaagaaaaaaatggataacgcgacacatgcagcgacgaccgatcgtcgctcggagtatcatgttgagaagaaaagtggccggtcaaaaattgcacagaaagaagagatacgtgatatgtgacatgtaaatccttggcggatgatagacaatgaaaatgaagatttgtgcagtctctctgtccaaacctctcttggagagtgggggagagcatgagcgcattgaaaggagcagttatctcagaagaaataagggtcctcgagggcccagtgccctctgattgtcatcgtgggtccaaaaggaggtgggatatgatggaaggagcggtttatacgtcgtattgtcaaaagcatatctagttccatcccaaagaattctctgccataacgggagcactgatcatctgtgaacgagcagtgccacggctaccttggctgggggcgcgaccaccggaagcaaacatcgaaccagcggcggagcctccctggctcatctgctcagcggtagagctggagcgctggtgcagctgctttctcttgcggtagcggcgggcaacccagaacatacccgcaccgtaagcggcagcaccggccacaacaccaactccgattcccacggagctagccttagccttggagcttccggcagagccatcggtattgtcgctagtgccactgtccgtgccgtcatcgctgccgccattcttgatactgccagtcgagtcgctttcgccactggggtagtttccagagaactcgaggggaattgtggggtcaaccattgacatcaatgactggatggattcactagcttgggtgtagagagcagaattggggttaactttaagcgctttcagggcatcgaccttatcccgagggaaatagaagatagcaatggtggcgttatatcccgtggactgccagttatagtaaggctcaatagcaaacataacagggctgtcctgagcagagaggtttggcaaagcgttctctatagcctggggggtatagttgaagatctgcgacgacgacaagggtgtagttgcaacaaatgaccagggcagctgactgttgaaaccaagctggagcagaatagagtcagacggagcctcggtgacttcattcgacggggtgatagagccagggagcgatggtggtgccgtgggcttcgcagtctcgccggaggtcgagctctccgtggcggtgacggtaggcacaataagaatagtcgatggcatccagtcattgtcgttggaggtggaggtggaagtggaagtggaggtagagagcgtaggcatctctgtcgtctgagactccacggtggtcttagccgtgctcgcttcttcgcgtgtcgtcttcgacgacgagcgaagaagcgagcacggctaagacgacacgggaagaggaatgtaggctgagtgagaggtgggggtgggggtggaaaccttggagctctcgtaagaggcactacccggaacagaggcggcggtggtagtagtacctaagaaaggagcccagatactagaaccagagacagttgcggattcagaagtagaggtagaatcagatccgggcgactgtgggacaggaaccgatcccagggtcttggtcggggtggggatggcaccagtgttggtacctccctggccaggaatgagagcagtcgacttggacggcagaagactaccatttggaatagacgcagtcggaatcaaagcagtgctaccagtgccagtagaggtgacaccaaggacggaatccacgcttgacacgagactgccgacgagatcaccaggagttgtagttccagtgggggtgggggtggctaacggtgagctagtagcaaacgcaggcacgctgactggaatggtaggcgaactatacgggtcggaggacacagtagcacttgtgctgttaccggtggaagacttgtcacccaaacccaaaagggcagaaagatccgaccccgagcttgccatgcttgaggctgcactgctgatcttgttggcgctagaagatccagtgggtgtcgcagacacggaggttgttgattcgccgagaatgccgcccaatcccgaggttaggtcaccaaggacactgtcgctggaggatgcaaaaggagtagaagaagcagacgaagttaccttagctgataagtcggagacgggggtagtcaaggatgtggaaccacctccgacgaggttgcccacattcgaggtcaaatcacttaggagaccgccgctagatgtagcagtagcagaagaaataggcgaagtgaccacagctgatgagccggaggcgggggccgcagtcgaggagatagaatcaactccgaggatactgcccacattcgaggtcaaattactcaggagaccgtcgctagatgatgtggtagcagcagcagcagcagtagaagtaggcgaagttaccacagccgatgagccggaggtggggatcgcagtcgaggatacagcactactgcctaggaggttacccacattcgaggtcaaatcactcaagagactgtcgctagatgatgtggtagcagcagcagcagtagaagtagccgaagttaccacagccgatgagccggaggcgggaatcgaagtcgaggatatgaccgcactcgaggatgtggaagtactaccgagaaggttacccacatccgaggtcaaatcactgaggataccaccgctagaggatgcagtagcagtagtagaagcagacgaaggtaccacagcagatgagtcggagaccggggtcgtagtcgaggatatgaccgcactcgaggatgtggaagtactaccgagaaggttacccacatccgaggtcaaatcactaaggataccaccgctagatgatgtagcagcagcagcggcagcagtagaagtaaccgaaggaactacagccggtgagtcggagaccggggtcgtagtcgaggatgtagtcgaggacgtagtggcagcagcagcagcagaagtaggcgaagataccagagccgatgagaccggggtcgtagtcggggagatagaatcaaccccgagtatactgcccacattcgaggtcaagtcaccaaggataccatcgctagaggtcgtggccgaaggagacgtagtagcggcctcggctgatgagtcgaccaccgatccctgctggctcgtggctcccgcatcggtagatgcggcctcggagttctgcgtactcgtgttctcggtgctcgaaccctctgtctgctgcgtagtcgtggtagtggtgctagtcggttcacctccaatagtcgtagtaccagtgatacgatgggtgatctcggggttcttggggtcgatcgagatggtcacaataaccacttcctgtccctgctggggctgaacggcagccgaggattcgggggtggtttcgggggtgggcgtagccgtggatgaagaaacttgggtaggaatcacgttgtcgaagacggcatcgaagattgagccaggttcgggctcagcgtttctgcgaatagttcgcttgacttcctgcgggaagtaccaacggggtcgctgaacgtgggcttcgggggcatcttgagctgcgacgagctcaagaccgcctacagcgaggaaggctgcgagaacggagatggcgtcgggacgcatgttggacaattctgtacgtgatcgctcagagcgggtccaaggtcagtgtacaaaaatgcgataaccaccgtctgtcaacacctcatgaatgatcagggagtgtgaccaggaggtagagtgcctggagtattcgagtttccaacacaaccaagccccgggcaattgcgataaattcacaatgtcaagattattcagagtatacaacgtctcgatggcaaccgatgagaccgaattggcgcaaacaataactcgacgataaacgaatggaaagggggatttcgatcaatctgaaacgacccccagaaggcgaaaaaaacgagtgtgggcttagaaaagctgtaaggagtgaacgacgactttctgtagaaccgtccgggcaacgaggtcaaagaaagtgaaaacagaaaatgcgggtgaccgatgcaaggggagagtagcccaggtcaacgcgaacacagcaaaagcagacaagggagagaaataaaggagtgaatgagtgaatgaagttgatcagagaagaagaggatcacttcatcattaggggggggaaaggtggaatgggggggcgggacacgttgtggtagcgtcaacaagggtaatttacggtaaattacaacttttagtgtatttaacgagctggtccgggcgtttggcaggtgcgtgggatgtggccacgcacttgcccctgagtgtagttcttagatattgaacttgatcctattccaacaatgtagtaagtacgttgtatgtttaatagataagctggtctgattatggacatctattgttgtaacaacatatttatacctatttataacccatttggaacctctgaagtcaaacatattccaagaccctcatatgaaaccatactaaacactaacctgccgatatcagccatttaggtacggagtcgtctagtcagtatttcgtaaataacggcaatgatggcccacgccatgcagaaaaccgaaatgaataatgaatgctcatgggggaagaatgagtctgttccctataggtccacgaccgctttgctttgtatatagtacaagtatatctgagccctcttcggcatttacagtatagagactgatgtacaggtactccgtactcggacgatatttcccttttcttctcttttgccgttacgccgttcacccgtgcaacaataatatataccattggaatataatccggctattgcgaatatcgatcgacaatcaaaaagcatgataagatggtaaatcaacagatatgactcgagcgtacccaactcaacccatacaagattgcacatataccttatgtctgtcagatatgaagtatagagtagacacataaaatccgaagaatgagactattttcgcgcaatgtaatacaatgatgacagcacttaatttcgaatcaaacccccccgaaaaaaaaacataaagtccgtgttaggatctgaaagcgtttttcatttgaggcgatcaatagccccggagaccattgacgaaaaaaatgccgaattgagtcggggctaaacccacctaagccgcggatcacaatataaaagaaggaaaaagtgagaaaaaggcgccaaggccaaagacaattccgagcaaagttcagtccgtcgcaggtctagccccggaggcgtcaactaagtgggcccttcccacacacgtacctgagcgtggagggaatccgctcaagtgcgtggccccaattacacgttaccaccattagttgtggctcaagctcgccagtcttacacacctacccccttctggcttaaacccatcaaagaaatctcgtgtagccgccgttaagaagtacggagtacggagtacatacggagtaagagagctgtccgatgaacgagccacaagttggtccttccatttccaagtctcgtgagacatatataattgtcgtacttggctagcttgcgagttatacaactatgctgtgcaacaccactagtactagttcaatccactatggaagtaggggatgagccctgactcaaaattgggttattagaacgagggtatattaagaaatgtttcacactatatcgatggttaaggttttatctctagaaccatagactaataaagattagctgatacaaacacctgcccatacctatattgtagtgtacaacatattctccatatctgaagctgattgaactgtcaagtttcagaatgataaaatacaccacgtgcccccatcggaatggagggttggcagctgcgatttcccctcattcttgctgtcattttcaggtgctcagcattccttagtgcgtttgagattgtgctaactaatgccaagtggtataagatcaacgaagccaaggtctcgctagaatctgtttccctctcctattaccctaagctcttgcctctttagctttgttcaagggcttctggctgcatgcaccctcgagatcgagaagcctttaggaatgcaggaacaaaggaccgagcatacaagcatatgcgagagccatggatggtccacgggtttaattatagttaaactcagccacattctctttgttggacctaggacatactccaggactctctactccgtatcacgaagatgtgaacaatatcaagcgtccacggatgctcccggcatcattccaagggccttttatatgttgtgcaataaacttccaggggttcatcaactgtaccatggacgagtgcagacgctagtcctgttcctgagccctacagttccagtctccacccttcacccttggtttcagcctgtatgtattgaaaagtgttgaacgcaagttacaagtttccaatgccaagaataccgtaatatttccaaccagactgtaaaatatacgtagatcatgtgaccgactccctcgcacatttgattcttgtctccggtggagagtgtgacgagagttgagccatcaaaagactccaaaagtgccatgaaacagtccaggtggaggtgtcggccctatacattctccacatcatcgtcatcccctgcagtcccgctcaaagtctagaactgcgtccactgccaggctttgtgactaggccagaacactcgatttcgacatccgatccctggggaagggacttgacggcaacgcaagtacgcacctaaaagggccaggcccaatgacaatgagaaacggtccacttttccgggaaaagaatataagagaaagagagacgaattccagactggatcattttctgtagaattcgaatctcgttcttttcgagcacagaatacttaccggcttaggatccgagaagaaagtagcgtagacttcattcacagccgagaaatcagccatatccgtgaggaagatgttgaccttgactgcatcttggaggctcgaccctgcagcctctaggactgcattgaggttgcggaggatttgtcgcttttcacatgttagaaaatatatcacaaatcaggcttcgcgtctctcatactgttcggttctggatgcttccctccaccatttgacccgtggtcgggtctactcccaactgaccagagcagtagaccatgttgccgacgacgataccctgggataggattgggggtggggtgggtgcacccttggtactaacgggggtacgtgttggcttggacatttttgaaagatgtgagtgagaatgaattctgtcagaataggatcgagaggaatttgttgagagtagtccaaattatctggccccagggacgttatcgattagaaatccccacattgaccgacttcccgaggtcggagccctctggagccctcttgagcgcccttgtatgttgtaaagcacaactcccgataaggagattcttatagacggccttaaagccggtatatactgctatatatatagatggtgcctggccaggatcaccctctcatagtgctcttttagatgtctatatgtccttatcaagtatatgaggttaaggtgaagactttctgattaacgaggtggattaatggagtagaaccatgtaggtagcgagacaccgcataaacctatgatatagcttcacggtggcagatcatatgatctctgaatatagaaaggtacttagatggtgtcatggtgcgatcgtaagtcatataataggtattaagaatactatagggatatcgtacttaacttatacaagctaattgagaattgcagccaggtggatatacccgaagtagctagtggggagtgtgaagagtgtgtccgtagtatttctcggaatatgttgtataataatgcatcactttattattcttggcgagagcaggatcacccctcatagcaacgagacatttctatggtaccataccacctcaaataacaaggcgggagagatcgtcaaactcacgggaggagatatgattgcgccagaagcgcagaccctcaattccttcttctcgacagagaagcccccgatcttcagccatctccagctcttcggcagccaccccgacgctccatttgaaccgatgcgcggcttcttgtgcagtgacggcccgaccaaagagagaccaatcccacgggacaggatcgctaggcggaactcgccggagctcctccatccaggcctcgagtttttcaatggtcttctcgtcactccagtcatatcgctgtacaacaagaagaccgcttttgaatcttcgtagacgcactggtaacttgagcttctcccacagctccgctgctttctgaaactccgaaggactggtcaattccactccattacgggaccgattgaaaacagcccagagatcaattagactcataatcccaccttcccgctgcaaaatgccttttcggtcatcagtgagatactcggctaggtcgcgcgcaagttctgataaatatagactttcagacccagaactaagcatgtctttagttgtcaccatcccgagagccgcagcggactcagatagcaccacgctggtttctggagagccttcgttagtagccatgccagactcacgcgccagggtctcggccagcgcaacgatctgcttggcggaggccatcaaagcctccaggtcttcaaaggcgttccctatgacctgctcgtttttcctccgggcttccagccctcggcgttctaaccccgcgataccaaccccggagtgtcgtggtgccgagggtataggactttcaacgctagcggcaggagagggtaaagctggcgaggaggcggtttgcgacggcgaaggtactgggggcgcattttgcaaaagccattttctttgaaccaaggcccccttgagtctttcatggaatgtcttatcaccacctgcacgaaatgaaagtttaatgctctcactaatttccgtgttcgcgatgtgcgattgctcaaataatggcgcaggagagtccacacgattagcgttcgccgaagagccagcagatagaggcgctccacaaatctcgcattccacaagagacggatggttcacaaaggtacaccgcctacaagacacagttcccctgagctcagaaggcgatagagacgtgttggcatttggttggcctgtatctcgtgtagtggctggtgatgcaaccgaactcagcaatgtagactcccggcttgttgcagcactgatcgccgctttgagaacggtcgtaaacggtggtttaatgccacatgctagacaaggaggtaaatttgtagccgcactagccgttgcggggtcgaaattggacggaactgggttggagaatgagcatatgggacagatccaagtggcattgattggctttggagatggtgaactctgtgagaggttggtctgtgggaggtgagagagtgactgcgttgaatgaagagccgattgttgggctacagtcgggctagctgttgcgctcctcgactgatcggccttcttcttctgcggtttcgggtatatgatgagcttcggagatgacttcaggaaaccagccttgaatccatgggtttgttagtgattggccaaaaataaaagcctcgaaagcaagatgtatgcatgtcgcacctgagactccactctatcgatttcttttagatcaatagccactgagtactttcgcgggtcctcggccgcaacatagcacactctgtgagatgtgagataggcatggccattttgataattctggattttgtatttccttttgcctctaatcagcaccccgcatcagaagctcaccatgagctacttacccttcatacaaccccaccgcatcttggacaaagagaaggatctcatcaggtaatagcaatggtctgagcgcagtagtcagatccagcgacttgaagaacatctagtaggttcaaccagctcccagcatcaaggagatccataaagagtcatgtccaaggcgattacgataacccgataaggcgggatgcatccgtagtcggacaaactaaagtccggtgagtaagcgagtatccctcaccgtcacgagtctgtgtggacttcactctcaccctccccgggctcgtgaacatctcatctcgtcttggaaataaacgttcatcaactgttctcttctctcaaaacagtaccagctgaggagtaagatcaagacttgattcttccagcagttcctcgattcctgccccttcgtagctcttttcattcttacatcttgtttctttgttctctttcaaatcttgcatctacgatgagttccagcataccaccttggcgttctaccacaccaggcacaatgtctagtgcattccctccaagtggtaagaaaaatatttcaactcaagtctcgttgctctggtgtcaggagactaacaacctgacagcggctccagcatacactccagtccaagcgcgtcgtagcctcgcccatcataccaagccaacaaatggaaccgttcctaccaaacccactcagtcggcaccaccggatacagaagcccgggcgcgagtggagttccccccacccgtacgctcgtatgtgcaacgctgttttgctcccgaaaatcaggttgcaagcgtgagcattcctgaaatgcaggagaagctgaggcacgtcattacggaggcggcccagaatgacaagctgggattgatcgactgggaaaggctacctttgccccaaactatggtgcaaaatgaacgcaacaagatcctggccaaccccagctcttcaaactgggcgtccagccacccggcttctccgggagatgccacacggaagcgaaagtcaactgatggccaccaatcggaaactggatcgccgccatggagaaaagctaaccgcaatcgttttgaagatcgagttactcaccctaccacagagaaaaaaccacgcataacactggaccagtctagtaagtccaaagctaatttggagatgaggaagaagcgttttgagggaattggggctagcgggaattctccttcttctcctgcagaattgccgatgcgtcctgctgacgtggatcacggccccgttgtcgggcgatgccaaacattggagaagaactacttccgattgacatctgctccgaacccggacagtgttcgtcctttgccggttttgcaaaagaccctggatttattgaagagaaaatggaaggacaatggcaactacggttacatctgtgaccagttcaagtctttgcgtcaagacctaacggttcagcgcatccgaaatgaattcactgtcgtcgtctacgaaatccacgcccgcatcgccttggaaaaaggggatcttggtgagtacaaccagtgccagacccagctacgagtgctgtatgcgcagcatctgggaggacacccgacggaattcaaggcctatcgtattctctatttcatttacacacggaactggacggcgatgaacgacgcactagccgacgtaactgcagaagataagaaagacaaggccgtgaaacatgctctgaatgttcgctctgcccttgcactcgggaattaccatcgtttcttccagctataccttaataccccgaatatgggagcctacctcatggacatgtttgtcgatcgtgagcggttgagtgctcttgcaactatgtgtaaagcgtgagtctcttgatttcgcatgttctgtttgagaattctcgctgaccttttatcgtagatacaaaccagatgtcaacatccgatttatcacagaagagcttggatttgagtctgatgagcagactgcacgttttgttctagacaactcctccgaagaactgctggcggagagggacggcgctgtaaggctgttgacaggcaaagcaggcacgctgttcgatcaagccaaagaagcggcacaccgtatcgtcgatatcaaaggccagatctaaccaagttctcattttccatctctttcttgcggcgaggattaaaccattggatctcagtcaaagccattttctcattttcttgattttggcgtatcttcaaaagcgggaaggcgtttaccacatacgtgcacatggatacaacataacctttcgagagtcgattgcacattgacatagtaaatacctataatatccaatctatccagtacttattccatatgcacagttctgccttgtatgtcaacactcgccttcaattgcacatcacggtagtattaggaagtgagatatgatccacgtgaggcgagtgagcaactctggtcgagaccttttttgtgcgggaacctgccaagcacgtacttcgtagggtagatgtagatgtggccaatgatcgacattgaacagagtttcttcagcttgccagtgccttaatataattgttttaacttttcatccttgtatctaatattcgagagaaaagtacggagtacggagtatcctcacacggatacagtcggcagattgcaggagccgcgcattcgccccggaaatctaaaattttttaatattagggaattaagcccccaatctaggccctttgtttctgatacatttttcatatccattttctttgttcggtggggtatgcaggtaggtgctccgtacatatccagcctaaattaatttcctgaaaaatcattaaaatagaaagatcggaacggcttccaatgggagacaacaccaaaatccacggtagaggtaaactttgtaggtcaaccatggttacaggtggggaaatgaggggcaaagatccttctttttcttctttttcgttctgtgtacctaccctttctagtacatatttacctgtatgtataactctgtatctacctatataggtaagatggatatatgcatgtacaattaccatgtacaatgatatatgtatgtctcgtactagtcaaggtcccacgggtacctatgggagatgacaaatggggagactcggacagaatcgcatttagtctagtagggtgtgattcaattacactagccgccgatggtggattatcatttgtctgcccaacggcaataataataaataaatactagagctggcgaatatattctaatggttctaggtacgacacctgacgatgtatacaccgaggctcaacccaaggttcagggttggcgttatcctgtattgccatgaccatacgatattgcagataaagatcaaagcctacatgcatatggagtactctgtatagatcctgaaatacccagaataccctcaagaacatcagaagatcccaaagaaagcaaaaaagcaaaaagcgggcccccctggcaatcatccaagccgcgtggttggaaccgcaatacggattacgctggtcaaggtatatacacctgggcatttgactaggccttgctcctcctttcctcctctttgcatctctccttgaatcccttcgccctcttttaccatgaaggtgagtttccctcgttccgcagtatgacctggtatcgtgtttaattaatccggtttctaaaaaaaaatcaaattccaaggcctttagacgatctctgaagggggagaaagatcccaaaccccatcatatctctattacacccaagtccgctattgcgattctacccccgaaaaaagtgagttgcgtccttgcgcaagttcgccagttgcgttgaaattcgccgctttctttgacccctcgcccctccttgtcccacttccgactcgttcttggcagtggctgaccgcatttcccaggtaatcaaagcgctttacgactaccaaccggaggggatctcgcaggaattggcattcagcaagggagatttctttcacgttatcagcagggaggacgattcggattggtacgaagcgtgcaatccgctgatccctagtgctagggggcttgtgcccgtctccttttttgaggttatcggcaaaaacgagagggatagtgggggttccggcgacctgtccaaggaccaccacgactcaggattctccgaccgcggtcgttcccaagattcttccaccaccaagaacggcgcattcagaatgtctgcactcaagggtcaaggcgctatggtctacggagttgtccagtacgatttccaagcggagcgacccgatgaattggacgcgaaggctggcgaggccattatcgtcatcgcccaatctaacccggagtggtttgtcgcaaaacccatcggtcgtctcggcggcccaggtctgattcccgtttctttcatcgagttacgtgatatgcaaagcggacaggctgtggccgacccgcttgacgcggtgcgacgcgccggtgttcccaaggttgaggagtggaagaaaatgacggcggaatacaaaaacagcagtattacactgggcaaaattgaccctggtcacggtgggggcaatatgacggctgtcacctcgggcatggataagatgtccatgggccaccagagtcaaatgagtcaaaatgacaatgtttatgtatgcaaactttctggttcccgtttgcgattactaaccgatgatgagcaggagcaccaacgtaacgccagcaagggaactttgtcgcaagtgcccacatcgcaacagagccaacttctcgtccccgtctccgcctatattccgcgctactgtttcgataacgacaagtattggtacatcatcgaggcgaagatggaagacggtcgctgctgggagctgtcgcgttactaccacgatttctacgacttccagatcgccctactgacccaattcgaagatgaagctggcaaccgtggccgtgggcgaacgctccctttcatgccaggccctgttacccacgtgacggatgcgatttccaacggccgacgacagaacctggacgaatacatcaagaagctcctgtctatgcccccgcatatttcgcgctgtgaactcgtgcgcgaactcttctcgccccgagaaggagacttcgaaatcgatcccaatgcgttcggcgaggatgcccggttctcgggtggatctcagcactccgtcgtggatccccagcaaaccgtgtcgcgccagtcttcgcagcagcaaatcaatgcatccaccgagcgggtatcccagcagcgcgccccagcacccacgccctacgccaatggtggcccgccgcccatgaaccgccaacctagctctatcacccaagcttctagcgcatcggccaacagcgcgatgaaggtcaaggtgttcttccaggatgaccttattgcgatccgcatcccatcgggtgtgagcatgcagcacctcaaggacaagctatgtgaccggttgaagattcaggacgatatcgttgtgcagtaccgtgacgaatcctccggctcctatatcgatctctatactgatcaggacctggagaatgccatgcaacggaacatcaagctgaccctctttgtcagcgtcgcataaaaagcactcacttctttcctggtgttgcggtcaatagacttgcccatgatttcatcgatgaggttatttattgtcaacctcatattaatgtttgccacgagtaaggttggtgcattggagtttttgaatgacgcatggttattccttgatttgtttttttcttctttttcaaactgatcatcagttctttcagcgatttcacatagtccatgaggacgagatcgtgatttaacgaatctgatgcgagatgtatggcacggtttccttcctatctgcctattttctttttctttctatttcttgttcctgcgatgtggcattatgggctttcttctatttctgcgtcaatttcgcatcagatctacatctcatcctattcaggatcataccccggtctgcctgcttctgtgttgtgtacatatttttcttacttctcgtgcatataccggggaggcctttttcatatgggagaggctcaaccgtggtatctcacagctctttttgcaccagctataaatgttgatatacattatttgagaatattagaatcgttcgggtagagatgtcgccatgatagaatatcacgtgacttgctgacttgatctttgtcctgatttgttcttccaaggttcgattcttggaatgttattctggtcgtggtccgtcacaaattttcaccttgaatcccagagctgcaggagctgtatatatattttctgtgcatgttgtaattcggcatctttagcccgggcgtttggcttacgaggacccgccaccactccagagctatccggaggaaaaacaaatccttgcctacaatacaatacctcggttaacgccttcgcatcgcaaccgctctccgccagggaaacccgacctctagcccaccgtcgcacccgcaaatataacttccaaaaaacctgccaatgagccgcccatcggcaaagctatgcgcggaatgtttcccaaacgcgctgcgggcgcctcggggcctccgccctacaatgttgcggggcgtcgctcgtagattttatgccacacagcagagggctctcggtacattacggcggccgagtcgatctccgttggtatatgtctctccggagaggatccgctcccagccggccattcagtcaccaaagggccgaggtctggctacagtctcggacggcgagaagaacgccgctcctacgccacgggatgggcctatgagagaatatgatgtgcgtgtgcgggatgggagactgagagatgacgaatatcagagaggtaagttgtgatcaactctggcgcacatattcaagctgacatgcgccgatgctctagggatcatccaaaatctgcaggacctcttcgaggcactgaaagattaccaccagcctaaagttgttcacccagagcccgagtctctgcaccctgaggcaacgtcatctttcttcgggtctttgttcggcggtggcgtgaagaagcacgaaaagtccgctgtccccgataaccttccgaagggactgtacatgtatggcgacgtcgggtgcggtaagacgatgttgatggatctgttcttcgatacgctaccgccgaacatcaagagtaagacgcgcattcactttcacaacttcatgcaggatgtacataagcgcatgcacgtagtgaagatgaagtatggaaatgacttcgatgcactgccgatggttgcggccgatattgccgagctctcaggcgtgctttgctttgacgagttccagtgtacggatgtagccgatgctatgatactgcgacagtaagtgttcgattcccggatggggccattcaataacccagctgatgatttgccaaccaggcttcttgagcacctcatgtcccacggcgttgttctcgtcaccacatccaaccgccatccagacgacctgtacaaaaacggcattcagcgcgaatccttcatcccatgcattaacctcctcaagaccgatctgcacgtcatcaacctcaattccccaacagattaccgcaaaatccctcggcctccagctgccgtctattaccatccgctgggcgaggccgcacagcagcacgcgcagaagtggttcgagttcctgggtgaccctatcgatgacccgccgcatgcagactcgcaagttgtctggggccgcgaaatcaatgttccctgtgctagcggcaaggctgcgaaattcaccttccaggagcttatcggcgcggccacgggtgcagccgactacctcgagctcgtccggcattacaatgcattcattgtcacagacgttccaagaatgaaccatacccaacgtgatctggcgaggcgttttattacctttattgatgcggtatatgagagccgggtgagtaacgagcaacgttcctgttcacctttttaccgtgcagtcaactaacaacccccttcaacaggccaaattagttctcacgaccgaagtacccttagcagaccttttcatgtccgaacctgatacgaagaaaggctctaaaggtgacggtggcgaccactcagatctctccgatgcaatgcgcaacctaatggacgaccttggtatgtctgtgcaaacgctgaagagcacgtctattttcagtggtgacgaggagcggtttgcgtttgcgcgtgcgctttcccgtctttctgagatgggaagtaaggagtgggtggagcgcggatcggcgcttgaaaggactcctgcgcagaataaggaggatcgggaggcttggcaaaagacgaggagtcattggagtgaggataatatgtagattatattgttctcttgcctttgtcctcttgcctttggttcttgccttttgttttgttcacacgctacactgtgctgtagagatacctgtgcacatagatcgagtttggtgtaaatagcatagctcttctttcaattatgaattatccctatggattgaatttgttctgctcctcaaattgaacctacaacatatattcgggacataaatctccttatatcgactgtcagctcaattcctcatatattggaatttggagatgcgcggacatgttttccaccctgatatcaggtgacgtcacgtcgcatccgaggacaagtttgtatggtatttcaagatccctaataaattcgaggtccgaatccaggcataaattcacgtcatcggcctgcaatcagcatgactccaccataccagtgccaataccttgtattgcctatggaacccccaagatcgaccacccaggcaacacaggcaaaggttaccaaactatggctccacctccgtgggattgcaggaaactgccccgcgaatgaaatgggagcaattcgcaatgtttcttgtctattctgctccattacaggttttcctgtcggcattggttggtaaagtgcccgggcgttaggttagggtatgggtggtaggtcatactatggtcattcttgcaaagcggttattccatcctggttaaactttggcttgggcaatcgactttccgctttgtaattagacgacttcatttcgttggtagatggacttcaggatatgcaacggggaattacatcattgacgtcgcacctagggaattgcacgatgaccagcttgattttgatatataaagcggaaaattcagccttacctatgctactctttcctctctttctctggtattattgatatcaaccacacttattatggcagcaaagtcacactccaagactgcggacggcaaatttgccgatctacaaaaggacaccatcgaagtcaacgacaagcagcacatgacaactgacaatggcgtcaaaatctccaacccagaccaatggctccgcatcgtagacgaaaagaatcttgggccctcactcctggaagatcagatcgcccgcgaaaaggtatctataacttacattcatccacatatataccaatatatatctaagcaaactaaccaacaaacaatagatcacgcgcttcgaccacgaacgcattccagagagagtagtacatgcgcgcggaagcggcgccttcggcacgttcaagctattcgagagcgccgaggacgtaacaaccgcgggaatactgactgatacaaagcgggagacgccgctgttcgtgcgattctcgactgtgcagggtagcaggggcagtgcggatacagtgcgcgatgtgcgcgggttcgctgttaagatgtataccgcggagggaaactgggatatcgtcgggaataacattcctgttttctttattcaggactcgatcaagttccctgatgttattcattctgttaagcctgagccgcataatgaggtgccgcagggtcagagtgcgcacaataatttctgggatttccagtatctgcattcggaggctacgcatatgaaccagtgggttagtatttctccctatttggttgtgtgtcgatacctgatagctgatgcggttcgtgatagattatgtccgatagagctattccgcggtctctccgcatgatgcagggattcggcgtgaatacctattccttgattaacaaggccggcaagcgtcatttcgtcaagttccacttcactccagagctgggcgtgcactctctcgtctgggatgaggcgttgaagatcggcggccaggatcccgacttccaccggaaagacttaatggaggcgatcgaggcaggacacttcccacgctggaagttcggcctgcaactcatccccgaagaaaaggccgacagcttcgagttcgaccctctcgacgccacgaaggtctggcccgaagagctcgtgcctatccgctacatcggcgagatggaacttaaccgtaacatcgacgagttcttccctcagaccgagcaggtcgcattctgcacgagtcacattgtgccaggcatcgacttctccgacgatcctctgcttcaaggccgcaacttctcatacttcgacacgcagatttcgcggctcggaccgaattgggaggagctgcctatcaaccggccagtatgtccatacatgaacctggtcaaccgcgacggccagggcagacatcgcatcactaagagcaaggtgaactactggccgaaccggttctctgcgaatccacccgcgaccgcagagcagggcggcttcgtcagctacccggcaaaaccgcagggcgcaaagaagcgcgcgctgtcagagaagttcaaggagcacttcaaccagccgcaggtgttctacaactcgctctcaccaattgagaagatgcatgtggccaaggcattctcattcgagctagatcactgcgacgaccccgtcgtctacaagcgcatgtcagaacgtctaacagccatcgatctagacctagccaagaccgtcgcgaagaatgtcggtggcgacgcacccgtcaaagcctccaaggaaaacaggggtatcaaagccaagggtctgagccagcttgaattcatgccggagaaacccatcattgcgacgcgtcgcatcgccatcctgattgctgacggcttcgacttcaaccagtacaccacaatgaaggaagtgctcaaggagcgcggcgcgtttgttatcacagtcggtacgcagcgccagggtgtgactgccgagtctgggcagaaggttatccctgaccacttctattctggaatgcggtcgacgctgttcgacgcggtctacgtgcctggcggaaagcatatccaggcgctgtcaaagaatggcgtattcaagcactggatttccgagtctttcgctcatcttaaggctattgctggcgccaacgaggctgtgccgtttattgagcggcagatcgggctttctgaggtcgaggttgcgaagagtggttctccgctgaaggagtcgtatggtgtggttacgggccatggagatgcggcttcgttgttgaaggttggcacggtcgcgcccgattcgaagggtctagctgagcagtttatttggcatgtttctcaacaccgcaactgggcgcgtgagctggatggactttcagatcagattgctgcttaagtcggtgttgcatgtgaaacgaattggatatgtgaccatcaaaattgtatgagcttttttttggttaaatgagagctaagtcatttcatatttctaaaatttaatcaaatttggtaaaagtctcacgaatccaaggccgtgtaggtggatctcacattcagatgctatgggtatgatacactgcgtatgtaggtggccagcctacattcttcatcggctgatctacaatacacaaacccaatcataagctcatgtagggttggaggaaatatgtttctgcaagattccatgctatcaaggccctctgccagattcttttaggccaacgtagcgctagcacttagtgcctgtgcctgcgcctgtgccgaaccctaacccttcccatataacataccccaaccgccagtagcaatgatataccaccattatagagacatcgaacaattgaaactagataaaccccaaaccctccatcatactcagcctcccgcataccacatccccatatctcataggggtcagggctactggtcacatttcaagacggattagttacactgcaggaatatcggaccagccgctttctgaaccaagagactctggaaggcagaagtattcatgatgtcctttcgtaaataacaagctatgtttctggattcttgttccattatatctttgatattggatctccgcagtcatggttcttcatctatcgcgctcgacacggctaagcgttgtgattggcatatcgacatgtttctttctagctgagatttcgcgttggttgccctttcttggtttctgtggtactggtcttggtatgatatcgatgtgctgataccgggctagtgggcttctatacccattctattgctctgattgcagatgctttccactatgtaagcgtgtttgggtgtggagttggagattgtgttggttaacatatattgcagctgaatgatttagttgggtttattattgctcttgttgcattgaaggtacagtctggtttggccgtcggtgtggtggtcatgctgatgtgaaatatagaaatccgagcgcagtgactcgcctaaggagctcacctttggttggcagcgggcgcaactgctcggtgcctttttcaatggtgttcttctgcttggattgggtattagtatatttttacagtccattgagcgatttatcgctctacaacgtgggtgctatcgcccaggctggattttgtctcatttgattatgactgacggtgcgtttagatattcacgaccccaagctgatgttcatcattgggtgtatcggattgggcctgaatattattagcgtagtctttcttcacggtagggttcgtggggtcatttttagtaccatgctaacagtacccagaacatggacatgatcatggacatgaacacagtcatgaccatagtctatcacccacgattgagacaccggttcttcacctcgacgaggaataccttgattccagcaccaaggtaaactgcaacaaattgagcgatccaattaatggagaccgactgacacagcttagcatgacgatcacaagcatcttcatttcgaaaaacatcgctgtgcagactcaggcggccacagccatggtcatggcggccacgaccacggtgatttgggcatgatgggagtgatgatccacgttatcggcgatgcaatcaataacttgggtgtcatggcggccggtctggtcatctggctcgctgcaccctatgccggccgatactatgcggatcccggtgtgagcatgttcattgccatcctcattattctgtcgtccttccctatgagtaagtgtggtaccagcatgaatggttgaaaaggagatagcgaagctgacactcttcagtgcgccgggctgggatgatcctgctagagagcgtgcccacaggggttgacatgtgcgatgtcaagcacgacctagaaaaggtatttccacctttcatcttctctttcttcattcctaacaatcaccagatcaagggcgtcaattcaatccacgaacttcatatctggcgcctcaaccaacaaaaaaccctcgcctcagttcacgtcgtggtgtctgaggactcggtcgaggactttatgaagacggcgcgcgtgatcaacgagtgtttccacgcctatggaattcactccattacactgcagcctgagctgtcagatgcagttgattcgcaagatggggcttcgcaggaatcttcccggtgccaggtcatttgcgggactctctgcgaacggttgacttgctgcggatagaccagatcccttctcataatgtcgagatggctaagttttggatatcaacctgccaagtggccgagcagtaactcggccatcgcattcttccttggtctagtggtgatgatttccgcttgtcattaaaaccgataagcgcgggagaccggggttcgattccccgagggagagatttctttttttttttttcggtttagacttgtttcattaagcttacattgaacaatggatgggagcttctattacgcatagaactgacgcatttaggctgacttatgatggccatattttcagcaagaaaaacaaaaagccccaacgtttcttcaggcagaagtgcgcgatgcgagataaagtgagacactaacggcgaggctcgggcaatgtgatttgtgttttgccactggagcctagactttgtttcttttttcacttcaactttatttaatcgaatgatatctattggtactttgaggaagaagtagtagagaggggtttgatagtctaggattgcatgaaagagcaagggaggatcttgtggcaattcctatatactctaggtatcgctattttagaaagagggacagcacacgttcaatggtccctgaattatcttcctggacattataagcaagcaagatgcattagcctaggtttcctctaatattacatcgaaatcgttacaaattgcgctgttgaagtagcctgactgggtgtacactatagcctgttgagctttgaaagtaattccttgacaaatgatttactagttatccaaagggatgtcccattaacaatcccctatataaaagtgtacgattgtaccttatcaacattgagcaacagccagtatgaaccattaaccaataagagctgcatagttctccactctgcgaataggacggccgtctactccaatggatagcaaattccgattccgagatagccaggtactttgtagatcacacagataaggtgcggggaatacgtaggacgaaggactgccttgtgtctctctcccctctttcttatatatctcagttcaccctccgaaaccagccatattccatctcaaatcactcatcaatatgactcttaattgggagatccaagcccaaagaggcagagatatcttgaacaattctattccgaaacaatggcttctccccgtcgacaggctgccgccagcttcgcagaagagcgtaattgacttcccccgacaaagcgggttgttgaatgagcgcgagctcgttatcactgatatgtcggccacggcactggtgaccgaaatgggtaatggaacaatgagcgcggaagaggtggtgactgcgttcttgaagagggccgtgttgggccatcaactggtgagattgagattgggagatgtggactgtgtaattccaatgttgacatgcttgtcagctcaatttcgcaacagagttcatggcagacgaggcaatcgctcgcgccaaagagcatgatgagtactacagacgtacaggaaaactggtcgggcccctggtaagctcatatacatgttcaaatttatcacagcgagattttaatgaaacaaccacagcacggtataccaatcagcgtgaaagaacacatagcaatgaaaaaccgaacatgcaacacgggatacgtagcttggtgagtataaatccaccacgacagcccgcattgctgacaagcaaaacagggtcgataaagtcaccacggaagatgctcttctcctccaacttctatctaaagccggcgcgatttttcacgtccggactaacgaaccccagtcattgatggtatgtccacaacttccacattagcggtgtatcccataaccaatgccatctagcatctatgctgcagcaacaatatcaccggcacgacattgaacccacttaatctcactctcagtccaggcgggtcctccggaggcgaaggtgcctcaatggccttccggtgcgcaccacttgggattggcactgatatcggcggatcaattcgctgccccgcagcgttttgcggtgcgtacggcttccgtccttcctcactgcggaaccctgtaacagggctcaaagtcgctgcttcgggccaggagacaatccgcggcgtggtgggtccactggctagttgttcaattgaggatctagagctattccagagagctgcattggagcaggagccttggaatattgagacatcgctgatgcctgtggcgtggaagacggttcttccgacacgggatatgactgtggctatcatgtgggatgatgggtatgtcgtgattcaaataaatgtctgctgtcagtatgttaatccatttcccagctgcgtccgcccccatccacctattactcgtgctctgagacacgccaaggagaagctggtagcggctggtgtgaatgtcgtagactgggaaccgtataagcaccagcatggctgggaagttattgtaagtgctgggtattctctgggcaagcacgttataacgctaacatagcccagcgcgctttatactaccccgaagctggcagcaagcaacgcgaagttcttgccgaatcaggtgagccggcacgcccactaactgattgggctctctcctatagccgaagcatgccactttcgcaccccgaagcatgggccctgcaagagcagcgtgatatctacagagatgaatatcatgctctcttcaatcgtcgcggtgttgactttattctgtccccgacatatcccgctgccgcggcagtgatgggcgagtcgcagtattggaattatactgcgatttggaacttggttgacctaccttccgtagtattcccatctggaatcttcgtggatcccaaggtagacatgttgacggagcaagacaaagagtacgttcacagggatgaggttgatgagagagagtggcgtaagtaccagggtccggaaagatatgagggcgcgtcggtgggactgcagctttctgggaagcggtttaaggacgaggagaccttagcggcggccaaggttattgaggggattgtgagagacaaggaatacttgaagacttgaagacttggggggcttgggaatggataaattgattcgatgaattttacttacaacacatttacacctcagctatttctcttcgtagcaaataccatagcaagcggcgtagcagtcttcactttcttcccctcaaaagccctctccatctcatcccacagtggattaatgtccacctctgatacactcggtgtcgtccaggtagatgaataacctctaaaccagtcacagtcctgctcatccatccaatccacgtcattctcctcccaaacaatctcctctccatccctaacttgactctcaccaactcgatcattaatcctaaaagcctcaatactcccccgagcattaacatataatctcctcacgccctcccagtcgtccacagggaatcctagagcctcagtaccagaattcaaaattcttagtgcatgatcaagcatcggatcatgaacctcattcgcataaaacgaacaaacagccccccaggccctctgagccctctcatttccgacaatgcgcggataattataatgcgtaatgacaagcgtcccacccgggcgtaactcccgcgcaaattccgcaatcgcaatctccggcctcgtccagtggatacactcacacgccatgatcaggtcgaccgagccagactccacagagctcctttcggcactttccttcaggaaccggaagctagattcgggaaggccggattcctcgactaggactctgcgagcgagcgcggtgtacccgtcgttcggatcagagacgatcactttgttgaagcgcggggcgagacttgatgagacgattccgcagccggcgccgacatcctgagcaagggaccaggtggaatggggtttttgagagtggtaggtaaagacttttttgaagaaagagggcgggtagactggacgaaaggtaaggtagtcggaccagtttacgccttgattggagttgaagccatattctatggtgggtgtggtttcggatgacattggtgatttagatatttgggaaacgattgaatgatgagaggtgacgatgatatattcaactaatgctctaggggtaatagggtgtatttatatgttgttttcttgttttctgcttttttttttgcgaacagatatcattttgttatttgtcattccctaaacagaggtatagcaatgagaaagtgtaaaggatcgggattaatgaaccagaccgtgtctattcgttgggattttgggaatttgaacaatcttccaatcaaagaggttcagacagagatcttcgatcagatctctagaatatctctagatctcggagaacatcggtcaggtcgatctcggatctcttctcacatctagatcacataattgtttggcatactccatatgacctttctccttggtatccatggtactatcccgtgctcgtatattgcgtatactgcagctatgcttgagtttttctccaaccccctcgagttctgcacggtggggctggtggagtcgcggtgatcttcaaatagcgcctcaacaagctcctatacaaaagaatgggctttttgtgaactaagcgtagtccgttttctttttctttttctatctataggtaggtggggttaactgcaacccaaatacggacatctcaacccgactcagctctcaaatcctgcagcgacctaatctggccaccatcttccccaaaattcccaacatccagccatttctccatggcagacttcagcgaagcatcccactcatccctcaaaatagaaaaccaagccgtatccctatttctccccttgacaatcatatgttgtcgaaagactccttcaaatgaaaaccccaagcgtgaagccgcacgccgcgaaggctcatttagcgaattacatttccactccaacctcctatacccaagatcatggaaagcatgctgagcgaggagatagatcgcctctgtcgcgccggttgtgcgctggagcgcagccgagtacattacattcccgatttcaatgcccaggtgatcaggagtcatgcgcatcagagagagatagccaatgggttttccgaaagtggggaaagaattgcgcctgtcgatgattgtgtagaagaatgggtctgtcgaagtggatttcgatgcgatgctggttttgaaagtttcaacatccgagtacggcccgtcgaacatgtagtcccataggtctgctctagatggttcaagtccaccgatgagggcaaagaggtcatctgcgtgctttggcgagagtttctcgaggagaattgctcggcctggaattgtttggctcgttggtagtagagctggagtgaaggggactattggacctttggggcgtagtactgccattttgaaattgatttgtttcagctattgatgtttgaaattgagagcgcggcgatattatatggatgctaccagctaatacctagcggagttggccgtgtatatactgtttattggactgatctatgtatgactcacgccagtgtgatttgttgtgaatgccgagagtccggacgtgataggttgattctccgaactggagcaaaagtacagattgactcaatagcgaggacaattttgcaggaatttcggaagattagcaactaattacttacattgatgtggactatagacagctgcttctccttacctttaaaataaaccagttttgcccctctttttgtacagcaaataccataaaaagatcagctggaatgcgccaaaacacatgactatcccactaaacaattgaatacccaagtagttcaaatccgcactaccatcggcgccaattgaagcgagcgcacctgctattggtggtcccacaagactcgcaaagctactcaagctttgcgccattccaagccaagttccaagactcttgggatcgggacagacgtgagtgaaaacgctcggcggcagaggaatcaaagccccggagataccacctgtgatttgggtcaaaatagagcaccgatgacttggagaatgaacttcacttaccatagaaggcagcaaaaagaacaaaccgggcaaggctgtctgcactgatccaacaaatacacagaacgcctgagagtataccgcaaatgatccaagcaatcatcgacccatagtaatgagcgaacaaagtcaagacaacacggccaataaccgaagaagcctgggaaatcatcaagatattagaggccattgagcgcgatgtacctagttttgtctccgcgtaagtcggaatgtaatagaaaggcgtgatataaccaaggtaaagaaaaaagttcccgatagcaaagctccaaaaaggcaaatccttcaatgcgcgcaaatcaatcaagctcctgcgctgggtatttttaaccttcactgcatgtctctccggccacaaaagcataatagcagccgcgatgaacagcgccagcatcaagaacgccacaaggcggacggtccaggcgaacccaacctttgatataagctggttgaacatcgttgtatagataatacccccgacaggcgcaccgctactcgaaatacctagcgcaacagcccttcttgttgtgaaagaacggctgaccaatgcaatagcagggacataaagcagtccgaatccgaggcccatgcagaccccctggcttaggaatatggcgtagtagtcatgtgcaagactgagcatcattatgccgactacacctagggtactgccgacgagaatcatgctctggttgtagccaaggtcgaaaagtgggccggatagtagaccgccgacgattaggagccaggattgaatcgttccaatccaggcgatgtcagatgatgtcgatgatgggatataggtgagtgcatagtagctttggaatgtcccaaatgcgaggttgaggcccctggaaatcagttggttttgatattcaattggaagtcgaaagatgtttcacataccagacattgaagaatataaagaaagcaccgagaacttggagacagctatacactttactttttacagcaaaggtagagtgtattccagatgactcttcatcttccgtgatatgtgccagatctgtgacctcgggctgcgtcttgcctttttccgataacatgtttaacagcctcgaataagttcaattctaaatcaaaacggtagccaggattcgaaggaaataacaaaagctaagacccctcaaatgtattgaccagtcagtatattagccctgtaccgtatgcaacactgccgtgtttaccggtgatgcggggtgagtgtctttggggtaacaacctatcacgtatttcgaagcactgtttggagtcaatctcatgtcggatttgtaatttctacgctactaattagttagttaatatcgatacgaaaatatcacgcttaccaggattgagttgcgccattggggtgaaattgaccagcgaaaggtgtgatagtacctcggctaaaatcaaccaatgctttgtagtatgagcaatggacaagtcatacagtagattcgctagggttatatttgaggaagagcttgattggtgtagaccttgaatactacataatattcagtacagtataacatgcaatgaagataaataacctgctgggaagcatagtggacaacggaaccatttccgaagaatcagagctatcgataagtgatattgattttcacgttgagttatttttccttgaaaatatgatggggtatcaaatggagtcaagtaattttgatcatcatccaaagcattaattccaagctccaacagagagcataagtacatccatcaatacacatgtgcatgtatctgggaatagagagtaagcataaaaacatagaaacatgaaagcatgaaagcagaaaatagcactatcgtgacgatatttccatcattagaggagaaaaaagattgaacacctgatatcagaagcccaaatcagaagaactccacgagacccgggaaagccaagcccaagggcaatccagatagaaaagaaatcgcgaacaaaacaaaaggaacagcatgaagaaatgatcataatcatctacttccgccagaacatagcttttccaacggtcctgccagcagcccagcgagcttcggctagcttatccttgaaggacacaccgccgccgtagcgcacagggcgggaggaggcagctccagactcagaagtagcagtcgcactcgaaccgccgaaagaactaggagcgaagttcgtcatattacccgcatcgaacttcgtctttccttcaacgattttctgaacgacgttcaagatagcataagcagtagagccaacagcacgaatagccgcgaggacagcgacagaccacaagatgatagcgagatagatgtttgtgccgccggagtcaacaccgtagatttcggacacagccatggcgaggattacgtttgcgaccatccagatggagaccatgtaagtacggacagcacgatagtagtcctcctgcaactgggtatccgatggcgggggctcggggacctcggggcgatcgcggaggttgcggagggccgcgtcgtagccggagtcaatatcgagttgttcggagggcatttcgatgacgacggttgagccgttgatggtctttgctgcaccgagatcggtgttgattacgttgtcacctttggttccccaagtgacgtcgtgggtgttgcagaaggcgtagacttggagaatgcagatgtagctgggcatgagcaaaaagtattggaccgaagaggtgaacatgtgccacgggtccaggtagaggaatgagctgtagaagtagagaccgacagttgacaacatggaaatcacaatgttcatcattaggctatcgccaacttctaggtcatcgtttccaaccccagcacgtgcgagtaactctttgaccaccaagtagagggcgcagaagaccgtgtagaacatgataatggcgtacacaatgataccagagagatagagattcttggcactgaaaagagaatgtcagtcaagttcgaatatatgacgaagcattttggactcacccttgcggtcgattacccagcgagataataaactgcaaacacataaccaggacacaggcatagcgcagaacaatgaagatatatttgcccatgttgtgaccaaatgggtcaagtttctcatcggtcaaagagccagcaatgaagtagaaagcgaggtagaaattggcctgtgaaagtcagtggacgcccccaaagaaaacagagcgcaaaactcacaagaccaaagtaagtaaacagcagattaaggaattgataaaagaactcgatgtgaagcaagaccttccgggtaaaagtatgatcggtcttccagatctgtttggcattgaaaatcgagtaaacagccgcgaagaacgcaccgttcagccatcttcgacgctgggagatgaactcaggaaccgagtccggcacatcggtttctccaacggcgttcttaacaaacttcaatacccatctctcttcccgtttggcgaccaactcccagcaaagaatacgatcttcggcgagatacatgttggcagtgaaaacgtctgcatcttgaccgtggagtgtttcacccttgaaatattggttcagggggccatgtccgtctgcgtcgttttgcagcgcaaagaatcgatatgcgctgagcgcaccgggcaacacagtgatgtaaccgaagactgattccagcggcttgtcgagaatattggacattttgtattcgaagttctgacttgccaccagagggttgagcagaccgagcatgttcttacctttagcagccttgatctccccagcagcgccggcaacattggagtcctgatcaaacgccttccacaagtggtagagcgccattggctctggtcgagttccaacatcgagcaaaatacaaatgttaggctgaagggcacgaccaaaggcattgaaaaaccatctgtgggagttcagcttcttcttgttgtgttccttcaaacagaagataacctgacacggaacaattcccttctccgcacccttaaacttgagatcatcatcaagcgagacctgcgtggtgtactcgtacacgtgtgcctgaacttccttttggttgacaatattcttcgcaataccctcctggtaaacacccagggcggccaatgcattgagtgtgcgcgggtggaccttcttacgtccatcagccacaatgcaaacaacgattttcttccatccatcgcggccccaagtacgcgacttggtgcgcgagcagaagtggctgatattctgcataacgccatgcatagtacgggtgaaaccaatctcgtcttcgttgtacatggtaatacaaataaacagctctgtctcgcgagtcgtggtaccaatctgctgccgaagcttatatccacgttcgccatagtcgtccggatcggttgtaacagcggtatatcgcatgtgcgtgaactcacgctcatcgcggcgagggaggaagctgtgaagaatggtgggaattttgcactccaaaataagctctccattgaccaactgaacttcttttttggcgacctgcttggatcggacaccacgacggccctgcttgtcgggtgctgggccatagtggaggttgggatccaagacgtgcgattcgtcgtcatattcatcatcgagatcgactttggacatgccatctttctcgtctcccaacattgtcgattcgctcatgaatgatcggacactggcgcgtgaggtgtggttaattgtgcggccatcaccaccgaatggatcttcgccatgggcatcaccaatatcgatgctcgtatccattgttgattttggtccagtgaacaacggcgcaggaggcaatggtcgacggggactacccccatatcttgagctgggtgtaccgggccttggactaccgtttaaatcggcgcgctcatatccaacacttgacacggagggtggtcggatgtgggatgggctccatgggcgaattggcgatcctgtgcgtgggggaatagatgggtacacagaagtgtctgcgaggtttgctgtgggaggcgggatactgggtacactggacaagctggatggtggacgcgaaggtgaagcgacgctaggcacctggtaataactatcatagcttcgatcatgtccggtcctataattgtgcgccctggtgttagaccttggtcttggaagacgttccattttgccgcgaagctggcactaagaggcccaatgtggaggtggaggggggatgggacagtaaacaatgcactagtatcaagtgtacaatgtttacaatgtttacagggtgggtgattgacaaacagcaaggaaggaaggagttggctcggtccttgtagcaatgcccattgacgggcaattgctcgaggctcccagcctctccgtcccgtcaatgaaggagtcggatttggcagtgcacgtggctccatcgcgagggaaaccactggaatgtgaagacggacagggttgcatcagagacaattgggaagtatagggaagtacatacggagtgtgatcataatctgggtcataatgggagggcatatgactgatacctgaatcatcgacaccgtcgccgcttggcaacaagcgcatcgttcctccattcagacgtgaggcattggtcggagagtcaggatcggacagataggaacttgcgtcatggttgaggtatgcgggcggcgcgtcgccgtattcggatggcggatggcggttcatgatagaacgtggaatgtgatgtttttttgtttcaactcactgcctcatagtattccacctgaggtgggtatcgatgagacaacgatgagaattaatccccgtctctcgaagatacgacagagtgggggtagatctgtttggttcgacagatgaggctcgaggaatggaggaatgtgagtataatatcaatattaaagctccacacacaagcaagatgaagaggatcaaagaggatcaaaggggataaaagagtaaaatggatcgactggggaaacaagtccagcccgttcatatccgtcgctctgcatcaacaaggtggaggtctaggtggttgtcagggcaacgctgaatttggcgaccgaatcagcacgggaaacacttggaaaacaatactccaattagtattgaaatgaaatatcacaggagattcttcgttattccattttattccttcccaatgcaatatcaaattgtcaatatcaagtcgccaaagtattcatcgcatcttcaatatccccagtcccaagtgggtcgatgcattctgacatgaatacgccacttgaacaaaactacattattccaggtggtatcacaaaagaatgcataattctgccaaaacaagactggccttgcagatctccccaaatcccatactttcattctttggttctcgttctgggccttcagtcccaacgaacaactggttaggttaggttaatcatggcagtaggtcctttgttgatgccatgatgacaccgctcacaccccctcgttgagcagtggctctctctcccggtccactgaatcggggtgggcaacacgacggaagaggctgtcgcggccggtgtacttagtcgtggagaggtacagagagacagacaagaacacggcaaatacggtaaaggcaaagatccactgcagggcaatgatctttatagcgacttgtctgacggcgagtgctagggttatgtatatcagcaaggcacttaagcaaatgatagtaaaagaaagaacttacacagagtcaaccaacttaaacaatacccaaggatataatcctcgcgagggacgatactgaacagtccgattgcgagaataacccagataaagatgttagcaacaatacggccaggcaggttatggctgtgaacagcgactgcgccgttccagaacaacgccatcaatgtccaggcatagggaccggcaacagcgggtaggtggacgaacaccggcaggccactgtgacgccagtaggtgactgtctggttgatgaagtgggcgatgaggatgatctctgcgccccaaaattggttgcgggtccagagcagaatccaagcggcgaggaagacgttgtttaggatgaaatgggtggcgacattggcagctgccacgacgaggacattgttcttggaaaagaggtgccagacgtagctgagctgagagaggaggaggaatatcctagatgggggattaatttgtggacatcccaaagctatagacattggctaaactaaccagaaaaccccagtcaaagtagtgttctcgctgaatggagtattatgcttattagcctgcttccagagcttcttgcccttcttggtatcgtcaggcgagtgaacggagtgatagatgccgatcactacgaccaaagcccaggtgagaggtacaaagactcggtatgtattcagcgaactggcgctgtgagtttcgcgtctagcgaacgggttgaatgatgccatgatagagttattacccaagctgaggaagctgaggaagccgatgataatttttaataaaaggaaccgagagtctagaagatgggggtcttataatcaaggattaaaaggggattccccgcatatggtcatcagaccatactattccaggacttgcagatgaggtcaattccatggtgatgacatcaacgcttccatccattgagggtcacttagggttacttccaactacatagcatagttatgtactccatctcgcgaaagctgaagagaccatgatttattctatcaatcataaccacatctttcggttttactagaaatagaaatacttgtgtttctgtgaaacatggactgagcgtcatcccagtctaactacagtgagaaaataacctgacgtaaccttgatcaagcgtagatcatcgcgcacagtccttttcaatacagatttcaacctcaaatacagtgagcaagctaaaaatccaaaagtactcgagttattatgctgagcgtaggaccttgggagacagaaatcaaggaaaatgagacccgcaactgagctgagcctaccttggcgccggaagacaatatttgaacttaaaaataaacttgaatggcatgttgaaacacgcgaggcaccgagtttgattctactcagcgttttacatactagtagtatgtactccgtatgttgtagggaataagtattactgtccgaatttggtaacgcggggaaatggccagtgctctcacctcatgccggtagaaataacagtctactttgcacacatgatgtgcaaaagtactagtatcaatagtaaccatgccaatgatatggttatctagggtatcaaaaccaacgtgcaaaaatataggagggaaaagaaatcacaatccccgcgcctccctcacagcctccaaaattctcccatgaaccgaagccggcccaacaaccataccatgacacccagccagggtacgacccagcgaacaatcaactggtttcccctcaagatctgtaacaagacagcccaattcctgcacaataagcatgccacccgcatgatcccagatcttcgagcgataatccgcactcaacggcaccttaacgaaagcattacaccctccctgcacggcaatggcaatgtaacgcatctgcgctgaccataaatccaccggattcggccacggacagccaagatgcgccgccacacgagcatgagcctcgagatcctgcgtctttgccgcacgcgtatcaatgaaccgcacaccggaagctccaacctgcgggacatgttcaagcgggcgtgccggcagcaaggctcccggacccataggtctgatggtagctccctgcccgacaacggccgagatcatctggccaagaccgtcacggtcgacgcggtcttcagcgacgagtcctgactctaggagattcgggcagccgaggacgccgattctttggatcccgttttcgactaatgagaggcagactgcgtactgctcgccgcggatgaaggttgctgttccatctacgggatctagagtccaggtcctgctagtgggggtgcaggcgccttttgcgccgaggtcaattaggtcgaggagttcggaggtggtacgtggagtgtggagaagggcttcgctttctgggtcattgaggtggatgctggttgctaggtcccaggttcttgcgagaagatctgggtttgagcggagggctgtggcatcttcttcgccgacgatatcatcgtctgggaagacgttgtggatggctgcaattattgaggcttgggcggcaaagtcggcgattgttacgggtgaggagtcgctcttgtcaagggcgcctttgtcgacagcagagaggagctcttttgttaggatggctgctcgttgtacagctaggctggcgagctggagctctttggcgtagggcattgaggtcattgtaggcggctttaggggttgtgtgtgtggagggtttcgatattcatccagggtagatttggttgaccggatgtagaaatgacagttctgagcgacaagtatgaaaacggtagtttattttttgggacacagaggggcatcacgtgcagcgaaacaccggtgagtacatgtatgtatccctacgtcatatctcaatctatactgatccactacaatatcaatagtatcatgagcatatctggtcgaaagatcttatttggcacaggctataatataagtaaaggcgtcagaaaaccttggacataaaattgcgtagagattcgtcagaccatactcaatatatataacaagaaatatgatcaaacgttgtatcacaagtatcaccatctatacaccgaattcaacaaatccttaagagcttttatccagaccaactcattacaacctagccttgtcttcttcacgaccttgaaggttagggtgaggggttcgaatgggtcgagtaaccgcgtagaaggcaagcccttgagacttagtcgagaactagaccgagaaattagaatacttcaactaatatctcgcgtacgagggtcatgacaaaccttgaccttagatccaacatagaaaaaagcaaagtctcccgggactaggtgatgggtgacacctgtcgcctcgtcctatttgtaaccgaaatgatcaataaccaaaagatttaagaagcagatgtcaaggtataatgggggagataccaaaatatcgatctgaccattgaggatatactttgtctcctcaaaattgtagtttgcgggtctttcgggtccagcctcgatcttatagaatcccgcagtgaagtatgcaggggattcagtattggtgcggatagagtggaagtcggcagtggtcgcgttctcgccctgaggaagggggatgaactcgtggccagcgcctttaatgacggtaataggaacgatattgctagacactttccataggtgaacgtattagagactgtatgatttgttctggaggtcgtgaggaaaaactcactgttgctatacttgatagatatggtcagaattgggacatatttaggaacaagatgtccatcaactaatatacacactcattgtactacagacggtattactcggtggcattcccgggatacagcgaagatcctgcgtgctttatcctgatgaggggaaaagtccccgtgccctcatgaggggaacactcgggtgcatcgcccggaggtggagaaatgtcgggcggagagccgtgggagccgtgatcaagtaaggtgttcttataattctcagggattgcgtgctctttgccacttcacgaagaggataaggctaaggatagaagaaagtgaggaaaaaggaagagagcggctgtacaaattctggtaccctgtactttgactacaatccacatgtcccctgatcggagagtctactatgatatgctttgaccatatggtgctcttgagttatcgaggttaaaaaatgatcattaccaggatagaaaggtcaacaagtcataatcattcaattgaggatatgtaggggaaaagccccaagaaaaaataaaaacagcatcggattaaacctcaatgtactcttgacgagggaacccagcgcggaggtatatcacataaaacgccgaaccatcatatccatgtaaaccagcaagacaagatcagaaggaagcaaatgccagctcgtaagcaaaagccaagctcatctttgcatgctgcagcatatgatcgaagctcaaatactcgatcttgtcctcggtagtgtggatcctcttatcggagttctcgaactgagactcgatcacaaatgccgaggggtatccgtaccgactagcagaagcatgatcagagcatgcatagccacactttgtctcgacatagggcacatcgcagtacgtggtgataacctccttaatgaacgcagtaaggccctggtcgacgtagtcgataataacacccacagactccttctcgccagcatcaagagtaccctgaacatacccagtcatgtcttgctggagcatggccttgacgttccgctggttcttcttgtaattagcatatacagcctgtgatccgagtaaaccaccttcctcggcagagtaccagtggaactcgatagtgttacgggcttttccgtgggttatagtctccgaccgcagcagggcgcgaagagcttcgaggatagtaactgttccacttccgtcatcatccgcgcccggggcagccaggatcgaaggcaggaacaagttgatgctatcctggtgggaaccgaggacgacggtgttatccgtctgaccgggaatgcgcgcaataatgctgaactgaccccagggatgagcgaagcgctcgacggttgcaccgtggtcactggcgccagactcgtgcactgcggcagtcacttggtcaaatagccaggttgctgactcgattcccgtttgcgacttgtagtagcgcgtgtggaaggatgtgaagtgttccaggttgcttctcatgttactcttgtcgagagtttcggtcaaaggcagaatctcgtgtgagtgctccatagcccctggatagtggacgacccgcgtggtgtggagggttccgtaggagcctgattggtattcatcggtgacatcgatgaagttcactccgtcctagtcgggggttagtactatgtcattgagtttcgaatcaaaaaaaaaaaaaatggcttaccagcttgagcgaccatttttcttcttcagttacccatcgggttcggtatggggccagttcaatcagagacttcgactgagggttttgaacaattgaaggtgctagaggttgttgctccgggttgactatgaccatggcagatgccgttgcgctgagcgcaagagtgaggaacttcatgataataaggataagcagaataagcagaataagcagggtaagggtcgagagggtttaaggattcttttaaaaggctagaagtgcaggtgttgggcacgcgccctgcgccaagccatttttggaccccgcgcgctaaaacactaaggctctgtatcatattattcttagaccggactgccggtgcatccggttgatcctttaacaatgaaatctctaacacgtacggatcatatcggctcgcaggatcttgttcgagactatcaaacccggggaacaggcacctaaagcacgaaaagcaccaaaagcctagacatgactcggcgagtctggggattgaaggtggagaatgggagaagaaactccactatgacagcgctatgactcacagccatgcggagataaggctcatatgtacacatcatggtgaagactaatataaggatacagagttattgtctacagccttgagctagtgtctactccgtacagcttcgatatttgctccactgtcaggccaactcatattcccaaatagggaactagggctagggctatcaggtgaccaatcaccaccaatcagcgtctggcgagttgtcccgtgcagacaaccttgcgtatcatctgtcccaggtccttatcttgcccattcctatcctatccttatccctctttctcctagacttgttgccttgattagatcatatcgcatacattatggctatccatccacgcctgcgaccagagggttcccagggccacctgtcgccgcaacaagccatagccatctccgcatggacagagcaacatgcagcagcgtccctgcgggatatgaccctatcggactcagcccctgcagcgacaacgccgtctacaccgactccgacgcgttcgggtccgcgcggagtcaccgtctcgctgtcgatccctctcgacgacgacgaagcgatcccgtcccaacgagtcaaggccgagtcccgccctccgacagtcagcttccgacgtcgggagcctctgcgccgggatggcctcaagacccgagaggctctactcaagggtaaagatggcagccgtcggagacagcgctgggagaacggtacgttgtatatgcactagataggtcgcggcgaatgccgacttgtacctttttgcctttggtgcaggtttggcaggcaaatgctgactaggcactaagatcgtctcttgcacaacccctgggcgcaaccgccctcttcaaaggactgggatgtccagcctacctatcctcggcatgacccgatgccttattatcttgcgcccctgtgggacgttcactattcccatgtggtggatcaccagtcggccgcgagggctgctgagagggccaatgagaagcatcaaattccgaaggaactgaggttaaagctgaagcatgcgcgtgccgcgcatggcatgctccgagatctggaagaggaggtccgtacgtttattcaaaagtggaatgaaagggagcttctacttgagaaagagggcttgcgggatgctcctgagtactcgaccagtgatgattcggaagatgagatcgtctttgtcggtcggaatgggcagatgcacgactcgcccgagcgaaaggagagactccgcttgctccgagaggagatcagctctcacagcgagcgagacggtgagaagatggtgctcgagactctggctgatgatcgtgctgctggattcgggtatgttttaagccttccctccaccttattccagtccgctgactcttctcagtcgctggttagtccactccatcgcatcctactatggattgcacacttggtccatcacagtagaagaccgacgagaagcctatgtgggcttccgatccccggttccgggaagccgcgccgggctcgtttcccacccagcttgccattcagaggccctgatcaagcccggcgaggagctccctcggcctctctatgctcaggtgtaacttccgccttcttgccctttctcttctgtcttccagattggacatatttattggggagtaacgttcgcggatttgtaattcatgttgtctctcggctacaggtggtcatatgtagatctcattggacgtattttctcggtcgcaattcaggtcaagggatatatttcctcgtagcattgatgcaatgttgatcaattgttggtgagtggggactatgggttcatggtgtgttcagttgaatcacagtgaagaatgcgagtgggatctagaaacccccttcgttttcgtgatgcagctgtaagtctgtgcaccgaaactagctgatcatatgtcgtcatgctaaggcccaagacatggctgtgaggagcattagattgatcgcgatcgtacgatgggaagaatgttgaccgtgcagggcgaaccgcgcaggatcggatacctcttcgatatgacatgatattctgaccaagccaaagtatatgtgatcttacgtacaacaggtccctgtgcactcctataccgtcggctatcaccgtctccaccacacaatggatcggaacggaccgtggggcccacggtttccaaggttcccataacgtccagggtattgtatatgtataaagggatgtctctgacaagctggacgttgtgtcctccttgcgtataacgtctcaagaattcccaagtgcttggacgctacagggcccgagccctaacgtaacaaagcagaagtctaatctcttatggagtacaggaatctcgtgtctagactagttcaatgcaggcccccgcaatctcactggctttcggagactaaaaagcaaaaagaagtgcaaagccacgaatgaagacgagagacagggaccaccatacagcacatcgtacgctagagagaagttctcccaccccttataggtagattcgcccatagcccaggatctgtggctgattttcgctttcttttcttttttctttgctttcgatttgtgccacggcctgcgatagtcgggtgcaacggtgtggctctggataaatcgctcgatcgtgtagaacaaagagtcgggtacccaaaaatgacgagttgaacattctccatttccccaatgttctaaatacttcgcacattgtgacagtccagagttctacattctctctgacctagtgttggccggctccaactcctttttctgctttgctcgttcccctcgctggcacattctccccccgattccactatatattttggcttctcaacaaggtagcccccacccctgtcctattccctcaatcatatgattttctttctcgtttcacttgtaccatcctggatgataaccttggagatatcactctaatgtcccttgtcgctgttattctacctcggtgtcccatgagaatctgacccctctttgacttgcggaatcaaccggactatctatccacaggtccaaacgcctggtgtgatcgcttttgctctgatataccctattgggccaaccacaccacctgcggcttacttacggctgatatttgatattactcctggcttcgatccacttgttccacctttttttcgcttatttcactgtaaaccagtggaacacatacatatacatacacaccccacaacccaaatcaacattgcaagcaccatgggctcctataaatcctcccaacctggcagctacagctcgacagacagcacatcttcaaaaagtacgacagcaacgatccacagcgaccgactaacccccaagccacacaaaaccgacgaggccaccaacccagcccccccaaaacacacctacaaatacgaaaccaaaggcgaagtcgtatatgagtgtcgtgagccgcatccccgcgcctcaacctcaacctacgcctccacaacatactccacagccgaacttgacctggagccccaaccagccgagtctgcaagtccccatgaaggtcgctactgcgtaaatgagcggctagaattctatccactggaggccatcccctcaacgccttcatcctttgcgccgctcttcccttcctcgcggcggctgctcatccgccacgacgatgcaaccgtcgacggcaacatgaacttgcgcgtcggcacgcccgtccacctacgcgacggctcccagcgcgacgtcatcctcttccatttgcgcatgtacgacctcctcgcgcggaagttctcgttccggcggtactgccgggactcgggccgcgaggtgtgcaattccgcaaggcgggaggttgtgcctgctcatgggcgaaggcctgcgctgcgcacctcgtggagtagcgttttcgctgggcttaggcctggttcggccggtggtcattgtccgactgatgagctcaagaggcagcattcaaggcttgggggtggttatggacatggacatcctgcgggggacgaggtagataagggaatgacagaagagaatgagtgggagaaggaaggaaagagcgctttgccgatactgggtgagacgattttgatcgaattctcgaattatgcgcatgtcgagctgcgccgcaaagggcccggctcgaccaagaaatacgagtttgagtattggtccacgaagtaccagtggcggagggaggtccgcaaagagggtgatctgcatgaagtgtcttatttcttggttgacacgcgcaattctaagactattgctcatttggtaccggatacgctggctccgctggaggttgttgaggaggagagcaagggggggtgggtgccaccttcttcattgtggatcagtgatcctgaagtttacaagacgatgcctgatgttgccgagtaagttattctgaacccctgttcgacccctcaaccacttggctagtttctctggttctatccttagctctggatctgtatctttcccctcttttgtctctcttttttttttctttttctgtgatttctacagggggtctgtgtttcgtgtacaatgcaccaacgcatgcaccatgcacaatgtaccatggaacccctgcacaaattgacgagacatgaggctgatgaattggctcgctcttttacagtgtgattgttgcaacagggatagttgcgctagttgacgactgcattcgtcgtcgctggcatcacgagcggcgtccgtcttggatcctgcccgctcagcactcgctggtcaaaagtctggaacgcatgggccctcggcgcctgatcggccaggtactccagcgcagaggatccgcctaagcgatacaggggtcctcggctccacgaccagacaagaatggtgtattatgagatggaccggattgatgagttggtcctgcactagccagggcttggtgctgcctctaatgacttaatgatatgaatgacgcgggatatgaatgttttgttcttgttctagtttagcttcttgtgactgattcctgtcatgcattctattgtctttttttggtattattttattttttttcgctcctcctttttgcctcatcttatttgtttattgacacgggtcatctcggtttcacggcatacggattcgagcagcctgattccgggcgatcctctaatacgggtctgacagggaccaagcaggcttgcagatttgtgcatttttcattgcatggcttggacatagcttacagtttcatctcacatctttcccaatggtctattcctatgctggcgttgcatacatatgtattacgtagagtctgaccgctccaagttgaaccatggttctattttgagctagagctggtctagcttctacgaaccatggttcgagtcacgagctagatgctgtctcgtgcttcattgacctatggatctttggccatatgcatgcacaccctacaccctcattccggactttcctcataatgcaagccataggaaggaatgccagtcttgtttagggcttacgatcgattggccctgaatgaatcttttgtttttagcgcgactaagagcccaaagagcatacccctggccttgctgccttatggaaattcaagaaatagccaatatcaggcccagcatgtatttttagtacgcccgtatactgatttaggacagctactactgtaggtaccaattttgtacgtggtacttatgtagtctactgcgcagcatacatgtatggatgtacctcaaccgatcaagatgtgcggggcaagccccctcgaatccgtaatattttagccgccctataataatgtgctggcctagtgccctaccccatcggctgtttctctacgtgtttcgtgcatactcgatgttagccgcattactgagaaccatggttgaggatattgtcgactctgcatgaatgcccaacacttctccaaagcaaacaccccgtcgctccgactggaacactcggattctctctggacaatcacaaatgaactaacaaatgaacggtcgatgaattcccttcgatggggtctctgcaggcggttaaccggacgggactagccgacaacgtgaaaatgaaccaggggttcttggccgtatctttgttcgagatctctgcaacacacgaactcttgccgcctttctgacgtttctccggaaatgccacccatcccgcctcattccctcgcatcgtcctttttttctcttcatgttgatcctaggcccgacagcaactgttcatgcagggcggcccggtctgtggctttcgaggtgcccagcaactccttccgagtcaacaatgtgcgaaatgcgacttctcacaatcatgatctcatccatcatgatgagctggcaacgctttccagtgcggcccaacttggggggttgaatctacatttcgggcatcctccacatcctcccagacccgaaaaacaattaaacaataaaagctatgacactgacgctgtggccatgggctccgctttttgggcagagaccacccacagctcttttcccccctcatgcagtccctcatggttgttccagaagcccgccgttccgccgatatggttcaagtccatgcgcaaactaatctcgggagattataatgtttccgtcttgccctaaagtacttctgctcaagtgaggcaagcaagaatgagaaaaaagaaaaaaaaaaaaggaaaatccaggaaaatcgcacgcaaatccccccccaaaaatttaacccaacgtggggttctctgagttgttcactttttccatccaatccgggtccaactttcttccgaaaaagggtgttatttattctggatcctagaagaattcgccaatatctccctgtctgtcatagagcgggaactaacttgggaacatccggcgtgcccctcttccttctatagcccttacgtgctgtctagcgtttcttcaagggctgttttttgcttagtcggcgtgcgccgggccgatccaggttgcagcctcaaaatgatccgcatactcttcgccgttccttgactggtggataaggaggggggggatttggctgacgctgtgccatgtccacatcgacatgcataaaccccctcctccgttagtttgacggttaggctcctgtttgttcgaaaataaaatattttaaaaaaaagatgccaaaaaaaagaaatacagaaataaatttcaaaaatacagagagaaaaaaaacccacggggttttctttcctggccttgaagatatggcccactgtttatataactccccgcttcccattgtcgtcctcgtgggaaggttattgaaaatcacatttaagaagacctctagagattccaaacgggtccaattaagatcctgttcgttctatatcttcttgtggttttcccttgaagttcacctcttgtttctccttcgatcttcatcttcaattgggttattcacagacacccatatcctccccactcttcaatcccacttcatatcaccccaactgcaaagcccaacggctctcctgctatcctatctttctaccaagcaacaatgtcctataccaccagtccccaggggaatagtgctggcagccgccccagctggcaggaccagctccagggtaagccattggaatgcgtggtcaagcctcagcagtcccaagtttcacctcaaatgacaggacggcccgactaaaccatcaccagatcattgcacacgcaccaagctatctcctcctgtcttcaacattgtctccgatcggcgaggtacttatccgatttccaatcctcctcctccccctcagtcttcatccaccgtcttcccatgctgcagaccctgattattttatttcccttcttacgcttcgtctcaacacacacgcacatagcgtgcctctatccctgctatgtgtctcgtgtgtgggcattgcaggagggagtggagtcttgcagaaaaagacagagaaaaatgcccccccccttcacttgtacaccgacttttagtttccaagcctttggcagcagaaggctaattacttttatctcggaattgcaggaggtcgtactgcttggtccagtaccgtcaccgttcagggccagaatatcgccgctcgttactggtatgacggtcagtttatcaataatgccaaagaggacgccgccgaggttgccctcaagaccctgaaccagcagcccagagctgctaccgtctaccagggtcagctgttcccgcaggcaacgtcgtccggctatggtcgcggaactggcgggttctgaccgtgtgttctttagctcaaatatttcctactcgtcttgggcggcattctcttcccttcttgtgtttttatcaaattcttttggttcttgattctgacgttgatactgaaccttgttgctcttaatctctgggtgtgtgggtgcttgttctggtttgttttccacctgtgaagggccctcggggatccacaagtcctatccgacacacaaacccatacatttgttgtcgcgttgctctcttacttgcatttctgactgcaggaaaaacccacatcccttcaccgcactcctctcctcccacctctttctcgtgtcgataccgttctcttcccgagcctcgttgatgcatgagcatgcactgtccctcgtcgacctctacctcttcccggtttctgcaggccctgcccacaatggctcactacaatgcagagtccatgtcatgggctctggtgagaggatcaccggcatcagaaagatggacaaataataaaagaggaaaatgcactatgcaccatccctgccccggatggccacttccagatgcaagtcactaccttgtttcgggattgtgaaacctcagcatcagttgtgacacaccacacccgagattccgacggctcaggtacatgatacggtgtctggatgccattaggcctcgtgtgatgcatcgcgaatcggactctcctttggctcttttcagcgcccctccccccacatacgtgtcttttgggggtgcacacacgtattcatttcaagaaacatccacttacgtttttctgcggccaattattgtttctgtctctcccgatttgggttaatacaggtcgcctctcgcactttattcgttccgcttttgttgcgccgtctgccttgagacaagatcggaattgggctagatgcttattaccatttgatgagaggcgagaggcgagagacgagggtcccatgcattgtgccaagtgactgctgtttgtcccttcgaagacatatgacttgtcatgctcgagcgggttcgacgtcatacccgggataatttacaatcgttactcccaactgcgcggttcgaatggcaatcacctgttgcatttgcaatagatgacaccccctgctgcttcgtttctccctggagctatggacgaatgtgtgtttgtctgtgccacggtggatgtgaagcgactcgcctaatcccaagcgcgttgcgacatggcaaatatggtggtggaagctacttggaaaaaggtcacaaggaggagttataggattatcatgggacaaaaattttcattttccgggcatctactttgtctagaatttggggtttcattttgatttgatttacgttctgcctgattattcgatgcgttttgccttgtttttttgtttttctttcctggttcagatcgggtgtctgcgactcacagagggagtttctttggtatctgttgtctcttgttaggctgcgttgggttttggacgttcggacacggaactggaccggggttatctattatattgggactgtaatggtcggggtttgatttgtatcagattgttctcttttgtctcttattatactacagaatatctatcgacagcactttacgggtgaattcttcttcttctcttttactaatgataggtacactgctggagccattgccggctggaacagactcgcccctttctagaaaagggtgctgtacatgcttaccctcgtttgaggtactattgatcaccgcgggttcttgccgcattggcctcccgtccgagcttacacatccgcgggtagcacagcgttggccatgtgtctagccaaacattaatttccgatgcatagcggccgagttgggcagcattccaaatggccgacgctgttcttggataaaatgaattaaataagttgtattaaaagctgatattaatattaatcgcttggcgacgcggagcatctagatatatttctacagtacgttgtagactcgacgttagatgttggtcagttactttggactgaaccatggaacgtcgaactctaataactatcaactctaattgtctattttgaccaactcattgcaggcctcgaatgaactcgaggtgaaagaagagaatctcagtatggattttcttaataattagggctagcgctatgctcggtatgttgcatatcgccacatagaatgcacattgtacaaaccctctgaagagtgatcgccaagactcctgcttgatctagtcgtgacaaaggtcgatctgccatatttgtactcagccttcctcgggcggtggctatgtcgatcaaattatacgggacagcaagtacatatacaatgatttatttcaccgtcgtagtcaatccaacctatctcaaaccaagaagcactttctaaaatacttgagaaatccaaaccatcacactgctatctgtcccattccaagcagataccttccacccaaataccaccatgtgtttcggctcatcgcgaagagagccgcatgactcacggcggcgcatacaccacagccctgacgcctacagccagtccgcatacaccaaggactacaagagaaacaagcgtcgtgcaggtcagaatgctggtgctgctggaggtggggatggtggaagtggagatggtggcggcgggtgcggctagatctagagggttgggatgggcgtgggatatctttattgatttaatagctgcgattaatattgactacattacttttagggttgatgggatctggaatatgatttgaatttgaaaatctaggcaacgggacattaaactcagccgacatgtacaaatcttgcactttactcagtactccgtaatcgagaattcatacctaatttgtcattaaaagttatctatctattttatgactcagatacgtgcagtccaccttagctcgtgagctgagtcctatcgacagccaccacaacgctccagccttacacattcaatacgcgaaactctttccatctcttgccccgtgtccacggcggttgcgccagccgtagtagagcctcaatagaatgcagccagatgttacaaagagaagcaatgctgcatttgtccaatggccggtcggatacccgatctttgcttcgtcgcttttgtagatccaaacgccgacgatttggcctggtgcaccaaatgacacgttcagtgcgattgcgagtcctgcgccggccgttgagtttatattggaggatagccagcctagcagaggtgggatgcaggcgaaggcaccgctggctgcgactatgaggcatccgtatcggctctagtgtttgagttagtttatgacgctcattggcttgacgtgcccttgggatgattgggtgacttactagatatgcgctagcagggagaactgcggagacaaggaatcccattgccccgatgaaagagaatatggctgaatggagaccccggctgtaaatgaatatcaggtaagtcctaagtcccttagtatgtctcgatatagaagacgatttacctgttgaagtagtccgcagaccaagccacggttatagtcacgacataggctaccgcgtatggaggcactgtcatcagctgagcacggagatgagagtatcctagtccagcagtgatggcaggcgtgaaaagagaaagactcgagaatggcgttgagatgccgaagtacaccttttatctaattagtcctccagattggcaggggaaaaggtatagagaacataccgcataatgagcgtacaatctccaatccgtcagcgtagccttagcatcctcccaagacatagcatgggcagaacccttagatccttccaaaatcaacctctgcgcagcaagctccttctcttcagcagtgagccaattagcagtctctgggtaatccggcaacacaaaccagaccacaacagcagatgcgcatgatggagcgccctcaataataaacagccatctccaagcagaaaggccatgagcgccattcatatggcccacaccaaatgcaatagccccaccgaatgctccagctagtgttgccgaggcgagaatcaaggctacgcgtatggatcgctcggagttgcggtaccagaatgtaaggtagtatacgaagccggggaagaggccagcttccattacgccgaggagaaatcggagtcctgttacttgggaataggtgtggacgccaccaaggcctattgttgttgcaccccaggagaacatgaggaaggcgatccagcgctggtgtttgttaatggaattgtaataatggataatgtgtttgggttagacgtacacttggacggagcttcttcagaaagtaatttgatggtacttcaaacagtgcatatgcaatcaggaataccatgagtgcaattcttttgtagtcagcgctttggattctcttggtcaatcaatgtttgcgactcacgtgtactgatacgaagtcatattagtttccgagagaagatcattgtgagtgtccgaattcaatattttggcattgcctagatatattagctccaagtctatccgatatttgggaccggaggcataccaacgttagagcgatcaagataacaaagcaagtagattgcagcgcacaagggaacgatgcgtagatcttgtttccagaccaaggccttctcgcgtgcattgagggcatcgtcgacaatttccgtgctggcaagctgcactactgtcagtcttctcaagctcgtataccataacactagtaggttattataataatgggagaagggagaaagatacttctgaagcttgttcaacatctggcatgtatttttcggttgccatttttccaggacttagccacaatcacacagaaaagtcgaagtttcaggaacaaagaaatcagaaaagaccgcagtcctttttttcgccttcttttttccccatgtgatttagcttccccgggcttttgtcccccgggttgttccccgcactagggctactcgcagttcctccgatgcctcaccggtatttcggtattggggtattgggaaatccgatttcgggactagatctagtgttcgaagcgttggtttcttagtctaaaatgatgcttcgtagatattatttaggtgacatttgattggcgtctcttgtttcccctagatccccacatcgaaatctcagggaccgtctaggaccgattccaaaatgaggcaatacaagaagcattgataactaactagcgacaagtaagagttatcattggttttcttagtattgaatagtcttgtaaataatttgtatgttagttaggaaaatacattatctgtgaatcatattgctccgacaaaactaaggtaaaatatctcccacgatagatcagcgcattgaagaacttctcatacaaataagttgaaatacttgcatagagcgcgtgttgtataaaatcaaaagagcctcgggatgcaaacaagacaaacatcttatcagataaaagtgttcccgatcgcatcgcaaacactcaaatcacccctccccatgctatgccgccgtttgctatccaagcgcctcgctaaaacatcagattcagctctatctatatccgtcgcaactatgtcgactaccaccgctccctcccacaaatcgatgccctccgcgttaacgtttgatcgtcacgccaaatgctcggtacgtccttgtgataaacatttacaacctagctactgtaacatatatctaatgcatattatggtgcaaatagacaactaaggcccgtgcgagtacccttcaccttcctcacggctcagtgcctctgccgatcttcatgcccgtcgcgacacaagcatctcttaagggcctaacatatgatcagctgcgagagaccgggtgcatgctctgcttgaataatacataccacttaggtctgaagcctggtcaggcggtattagatgcagtgggcggagcgcataagctacaaggctgggatcgcaatctcttgaccgatagtggggggtgagatatactaccgtcccctcgcaaatcgatagtatgtactaaccgggtatattgctattcagtttccagatggtctcacttcttcagttggcgactgtcacagaggaaggagtgcgattccttagcccgcatgacggctcgccaatgtaagtggcttcgctgtaagccctataactgaacatccgaaatactgactttttatcaggttactgactcccgaacactcaatttctctccaaaattccatcggatctgatattatcatgcaattggacgatgtgattgcaactacttcgccagatcatgctcgtattaaggaggccatggaccgttctgtgcgatggctagatcggtgcattgcggagcataaatatcccgagcgacaaaacctcttttgtatcatccagggtggtctggatcttgaattacgaaagcagtgctgtgaagagatggtagcacgagatactccaggaatcgccattggaggtctatctggtggtgaggcaaaggaggagttctgcaaagtgtacgtgcctctactttcaccaaaaagaaagaccgaatgaactgaccaaccaaagagtgcatacatgcacggaaatgctgcccgagcataaacccagatacgtcatgggcgtagtatgtcttactgaattggttcttctgccttagctaatgacaaaattagggataccccgaagatattgttgtggcggtggctctcggtgcagatatgtttgactgtgtttggccgacacggacagcggtaagactcaatcaaccctccggtttggttcttgcactgatattaattagcgcttcggtgatgctattgtctcatccggaaccctaaaactaagccataaatcgttcgccgatgactttggtccagttgaggagggctgcacctgcacttgctgtcgtccaactgaccaaggtggtcttgggcttacacgagcatacatgcaccacatcacagccaaggagaccgtcggcgctcatctgtaagtgtggactggccacattatcttatttcggttctaatacttctacagtttgaccatccataatgtccattatatgttgaccatgatggggaaaattcgacaggccataattgatgaccaatacccagctttccttcgcaaatttttctccgatatctatagaggcgataaatcaaattatccggagtgggcagtaggtgctctgcggggagttggagtggacctgttggcagactcatgactgcatggccattgattttgatcaaaagaaaagtgctttgaagaaagaaatgagctattcactttatgccatagaaaagcgtgtgtatcaattccaggtgtcaagttgactgaacgtggagcagattccatcaaacttttactaaaaataagacgtcggtcctctaccctagtccaaaactatatcattagacatatatcctaaaagatggccggatatatctgtagaaagtatcattttcgaggcttcagggaagaatatcggtattccttaaagtctcgtgtagatacgcgtgttgattggatactttcctttgaataagtttgcactataaaagacgagatcggcacgtgaccacgtgtcgcggtcgacgcgatccaccgatctccaagatcctccatcgtccacttgatacaagtccgtcaaacatcaagagatcgcctgatagaacgtctctcgctaatttattctgcgccatgactcaagaccaagttgccgcagtccccgcggcatcctcgccgccatctgaccccccgcacgaagagcaccaatacctcaacttaatacgcgcaatcctctccgaaggcgagcataggcccgaccgcaccggcactggcacgcaatcaatcttcgccccaccgcaattgcgcttctctctctcgaagccgaacccagaaggcggcgagccaattcccattttgcctcttctcaccacgaagcgagtctttttacgcgccgtgctcgctgaactactctggttcatctctggctgcacctcgtcactcccactctccgaagccgggattaagatttgggacggaaatggtagtcgagagttcctcgataaatccgggctcggccaccgcgaagaaggcgatctaggacccgtgtatggattccagtggcggcactttggcgccgaatatgtcgacgccaagacggactacaccagtcagggtatcgaccagctcaaagatgttgtgcacaaactcattcacaaccctttcgatcgccgcatcatcatgagcgcgtggaaccccgctgatttgaaaaagatggccctgcccccgtgccatatgttcgcccagttttacgtctcattcccgcctggcatgaagcttgatgaaaagactggtcgtccatcgaagaagggtaccttgtcctgtctgctctaccagcgctcttgtgatatgggtcttggtgtgcccttcaatatcgcgtcctatgctcttctcacgcatatccttgcacacgccgcggaccttcatcccgggactcttattcatactatgggtgatgcccacgtctaccttgaccacgtcgatgcgcttaatgagcagcttgctcgagaaccaacagagttccccgagctgcgtattaagcgtgatgaccggggcagcgcggttgttgatggctggaaggaggatgagtttgaggtcattggatacaagcctcacaaggccatcaaaatgaagatgagcgtttgatttatataggtttctgatttttggttttcgggcactgtccgagtcactgttttgtatgataccaattattccgtgatgtatgccacgggagtatattaaaatagcaatgcgctcaaagtccgggtctacatgtatagcaaatcaactcatgcattgttggatcagaacatgcgtctatatgtaccaagctggcatatgcttcgaaaagcaaaaagcaaaaagcaaaaaagattaaacagagaatgcaagtaaatgcaagtaaatggaaagaaatgcatcatgcgctcccaagaacagcaccagcgccgcgaagcaacacaattgtgtcgccttgctttaccttaccagcaccaatagcctccgagaactcgaggaattccccagactcaacatggaagatccgcaatctcgaattctcctcatcgacccgattattaaaattctgaacccgcaacttcttcgccgcatcatcaagcacacgcccaaccttccacctcgaatcaaagaagaaatccccagccgggggttccgcagcctgcgtctccgccgtaccaacagcatgcaaatacaatctcttctctgcaggaaccgaggcatcccccttagccgatcgcttcaacccattaacagcgaccgcacgcgcagctggactattcggcttgggcttcatcttcggcagagccggcaggagagtccccttggcggcagcctgctgcttatcgcggccccaggtgcgtacgcgcgcgaacatagacttgattgtatcatttggtgaagcgacattggtctggcgcgcgcccagcggggtaatcttggcgcattcgtgttcctcgcgaagacggtgtttcaggcagtattggtggttgcactgggggcagcgcacggcggggtctttgagggtgttaatgagggttttgcactgggtgtgggcgcattggtcggtgttatagatagatggcttttcgggggcggtgcggttctcttggctggtgttgtttcttccgttgcgacgacgggcccattcgccttcgcgagggcactggtgcgcggtttcggtccggtgatctagacagaatgtgctgtggcaggattcgcaccggaaggggaggaagtcaagttggccgcagtactcgtattggcagtgccggcctagggattccaggtctgtgtcggccatttgcgtgaaggtttcgtttgggtccctggaggggctgcgccctttggatacggttatagggggcattattatgcttggtctttggaattggggatatgacacaggaaccgaaggagaatgatgcgtgggatagactagggattcgagtatgcgatctgatagaacgcgatggcacaatcgccatgtgactaatgtggggaaggttctgggcttatctagatacggagttaagttcggagttagttagtccatggaatgaacgcatcagtatgaacagggaagatctggcaagatacgagttatctcgccagcctgcgaccgtcgagatagtcgttgcagagcgaagcgactgatgatcacatgatggcccattagaacgctattatttctgagaaaacttggccacgtgacacgtacatgagaccttttgatttatacttgcttcgcaattaggagaaatatcaatgatttcaatttcttttatgaattcaagttcatcaggctccacagtcggaagaaatccccggatgggcttcttgacttaaagctactctatgttgtatgtatatatcagagttcgcgtgtggacatatcatgaaatattcgccattgacaaatgccaaattccaaagaggatagttacacggcatacaacgcatattgtaatagaaataggctagttatgctcagaaacccagtgacatatcaccccgaaccggtgtcggtactctcaaagtggaactgtcgaggaaatcctatttgatctacctgctggtgtattggtgcccagtgaagaccacacagaaatatcacttgaaatcaatctttaatgccaaaatcttggcttttaatactgaaaatattcggtgtatcatactatctgtaggcatggttcgagcaacatcgaatgtgacggttatagtcattaacactaagtagtgaaagagcctaccaaggtatgtagagtgactacggtatgtagaagtggagatatatggcgatgcatagcacccgggaattcttatctgtgacgatcatgtctatttattggagaacctgatacatttgggcgttcgctattctcttaaatgcttctcctagtttctagaggaggaaatcttagtatctttgttcacatgaagctatttagaaggcttgacggcagtagctagatcattatcttccatctatctcacacagctctcatattggttgatcacccctcattcttcagatacattgattgtactctgtacgtgcatcagaaatacgggaaaaccttttttcgaggtattgttaagctttcatgcagtcggtgcctccaaggctgtttcgcctatatttttctagttgcaattaggccagggaaatgaagacattcccacttgcttttttatagacgatcgactagtaatgtactactactcttactagcgaagctgtactaaatagtaacggacaggccggaactcttttcactgcctggttttgaaggcgaacggaaaccccactctgcagaagtcggtgaaaacaagagaaaaactcatcagatatcatagtgtaagtcaatatcgagatcgggacaatgcggggagggaccatacattagagaccatttagggcaagcatacgcgttgtcctagacatcctcgtatgcctcgaggggtacggatgtacaactcgaacttctagaatctcgtccctgagttataaggtcgatcaccgcgcggcgatctcaccaatcaccggcccgtatccagcaccggcggccggcccggttggcactgtgattggttcggatggccgaggcgttgtctttttcaggcgatctataaatgttgatgcttgatttctcgataagatgttggcattacattatagaatacgtgctggggatataactatggaggggtttcttcttccgttcactctttttttcttccccctgctttcatttccagtgcagtctcgcaaccctaactcgtttacttgatcagtgttttcccacagtaagttgtctcatggaatgccccgcgttggatttattcggtctaacagtgccaggccagttagattgcagctctaccaaaccttgcccggtcctgtctatagaccacgaacccaagactgccagacggtcacgaacggatgatatagcattgcccgcttaaaccatacatcataaaccatgacgcagcaaatccaagagcaggctatgccattccgtatccagcacactagaagccggatggcagaactactggcggccgatgtactcgttgctgcaggttcagcaacactgattacgccagcagtcatgatttttgataggtaagccaagttagactccatcttatcaacgtacgtacgttaaccaatataacccagactcgttgtcgagaaatcattctataaccaacctcttttcccggcattccgcagacacctctggttttccctcacacaacctgcaactttcttaacatcacgacccagtctcctcgtctggtccctttacacggcaacctttgccaccgccaatgcttcagagacaattctgagcaagtggtaccctcagattgaccatgccatctcaggcatgaccaccttcgctgcaacattcatagtcaactcctctgtgggcatttggaaggatgtgaagttcgcacaattattcggccacagcaacacctctataccagttacaaacaacacaaccccaccaaggacgactccaattaccacctccacctccacctccacctccaatacaagctcaacccctaaaacggcccgctcaatcggccgtaccagaattcccgtagcaacatactcagccttcctcgtccgggacgccctcacaatctttggctccttcagtctccctgctatggtctcggcctccattccggactccatcgcctcccaagaatacctcaagattttgatcgcgcagctcgcgattccagcgtccatccaacttatcagcacgccaatccacctcctcggcctggatctctacaaccggccacaggtaatgccgaccaaagagcggatcaaccgtatcagtcgcgactggattagctcgtcgctgctgcgcatgtgtcgcattatccccgctttcggaattggcgggttcgtcaatactgagggccggctttacttgcatgatcaagttagtggtcggcggaaggggccttgaggaccttatatatacagatacagattcatagataaatataccctttcttttctctttctacttccactttcaaatgctcaacggtcttgtgtgtgctttatccgctatcagtcttccccactcccgatatcaccgggccggttggttgtaggcgcttcatctcgggtcggcaagcgtcacaaacgtcaattttagactttctgactggggttgttaattttgggcgagaaatgttattgcatcactcgcctcgaagactggctgccgatgttggttgaaatataccgctgatttgactgcacggcctaaaatgatgtgttattcttttttagggcttttttcgcagatggcatgtggttatgtctgcaaacacgaatttcgtaaaagagaatgcaaagtccaaagtcaagaatcaaaatccactataaattgccttgctttatattcattggcgctatggttgtccacactcgcctgacaaagcaaatgctctgtgacggcaaagtcataggtcaaccaacctattgtgagtttatgcggtgcaaccttcttacgcccatatagaaagacgactggctttacatatgttatgatatatctccctatacatcaacactcattgggcacttttccgagtcgaagaaattaaattagaccttatcagaaggctcggcatgtttcaaaagtagcctcacagcctatggtattccgatatgtttatctctaccggagaaatataaatactagtttcttctgggcttgcttgaggagaatcctagcatgctcaaagaacattcgctttctatgcggccaatttgttcgctctcggtacttcagaggaatgactcaatgtaagcgggccagcgcagggtattccatggctgttttccgatgcctaaacttggaagccaaagcctgaacgacagccgcaaagcgaattctggtcggtgcgtcattgttggagacggatgagtgagatcacttcacccacagatggatattatcgcactgctgtggatttatctcaagttggctatctggcatggcggaggaatttgatagaagtatgaatacaagcaagctcatctaacgtcgctgtcaatggcctcagttccagacgcacggcctttggatgccgagctggtagccgaagagtcggcatggctgaaatcgtgcaaggcatggcacgggtcaacaaaagatgggtactgcccaccggcagcgttgaaagacgacggtctccacatatgctggtgagcgatattgaccagtttgccgaggaccgcaatttcgagttttagcttgatgctgtaaagtgtggctttgagggtcgtttgatagatatagaagttcctaaactcgataatcatcaaggcgatatccatcaggatacaagatacgttgacggcgagcagctgcaggatagtcttacgactgatatggtcctgatttaagcgcagcatgcgattcgtctcccacatgtacaacccagatatgataacctcctgcacacagaagcccgtcagctgcaacttctccatgacatcgtacccggcaaccgaggccgcagaactggagaagttggccgcgtacgtgaggacggttgtgggcacgtgcagcaggaaaatattcgtgatgatcatggttttcaccatacgcagcacgcgcatgttctgaatcaccagatggaggcgcgaatacagcacgaatgattggccggttaccatggcccaccaaccgactgttaagagcgtgacgggcacccaagtggcagatgtcagattaaagaatttgagcaggtagccgaccgaatatggtaggattccaacgctggctatcagcatgctccaaaaataggcgccttcatagcgtttgaaggttaggaaaatgagcacgactagctcaatcacgttgtaccatgcgacgctgatgaatgttgcgatggtgatacggacgccaatactgtcgcctgtataactgccagtgatccagttccctggactggagttgctgagagaggacatgtcctcattgggaagatctaatatgggaagaagagagcacacggaccgtgaagtgacgtgttttggggtttttttctttggcggggttgctcctaatttattggaggctggcaggcttttccgtcctggccccaaggggtgccaagtgggccaaatgtaatagttggaatttattttaataagatcaacatcaacaattcgtactagatgtgacccacttgtcgtgttccttgatgcgaggggtcatgataatattgtatacggagtacggatactgtattttcctcttgatttacttcaacctgaggcggaagctgttatacgttagatttatcattccagtcttcctccagtccggaagaatttcaagtctagaacctctgccatgggactctccctgccgttactgccggcattcagtcacatcactgcgtcacccataccagatctgactgtgctggaagattgagcctccccatgtatgctcctagcataagcccgatcctcttcacggcaaagataacttggcataacaccgacctcttgtgctggcttcttcaagcctcgcatcattttcagatcataatgatttcgctcggtccgcaaaagccctaagccccttgtgacaacatcacctctctctaaaaaacgaagctcgcattatccggttgacttcacttcgcggtgaccatcgcctcgcacttggtcttctgcgtcgtaaaagacaagattggctctttgagcaaggcatgcgggacaggccagacggcagtagatcagatgaatttgacaccgtgggaaggagtgcgatgtgtatgggcgcgatcatgggaatttcataattaatcgggtttgatcaatgtcaaagtgaatgtcgatggactattttgcgctggaatgtacctaggaataggatggcgtttacccgggacctcgggaagcccccaggtcctcatttttacgagaatgcggaggtggcgtagttaccgtatttgataggtagacaggggccaatctgatagtatgtggccttgtattacagtggacatcacatattattattgaacgcgtggttgattctgtgtagtgaagtgtagaggagtatggactacatagtagtgttgaggactttgatcagccgtccaaacattagtacattagtactagaggtactctgtaccagaggaagcaagcattttggcgcttttttactttcaaactctgaactatatcaaaacaccaaggagaagctaaccttctgatttctaggttgacctgctggtggctgctatctatacaacatcaacaaattcaaagatatgctaatgatatagagacgctctatcaagttctatacttaatatggctatgatgctatgatgcatgataaatggatatagacttcaaccaatcaaggctacttaaaagcgagcgaaccaatcatatattggcgtcgttaaagattaactccgagatagctccacccaaggtcgcaaggatatggaaatccattgagtcttgagattagttcctttattccttcctcaactaactatagatatgcatgagtgtgtcccattagcccgtaaaaaggccaaaacaggctgcaagacttgcaagtaagtatatgtccatcctcattctagcactctcttaaccggatcaagaatccgccgggtcaaatgtgacgaaggccgaccagcttgccgacgatgtgtatcgactagtcgggtctgcgacggctatggtatatggggaggaggtggaagtccttacgggcagccacagagcaaccgaactctatcaacctactgcacaccagtcccagccggcaacctcagccacgaggaacagctgtgctttgactggctgattcaacgaacagcaaagaagttcgccggtttattcccatctgacttctgggagaccttggtttttcaagctagcgggcaggaacccgccgtgcgtcacgctgtcattgccttgtcgtctgcgcatcgtttccaacagcgattcgccgccgcgccagataaatatgacgaagagtgtttcactcttcagcaatataacaaggcaattcaacacctacgcaacaatgcaaccgacaatagctattctctccgagtagcgctgattacgtgtatgctctttatcaccctagaatacatgcgcgggcagtatacagtggggaatgcacatctccaatatgggataaagctccttctcgatatatccgcgccacgtccaccgtcatccatggttccgaccgttttgtctcccgaagaagatttcgcctacaacgccctggtcgacgcctatgtccgattaagcattcaatcagccatgttcgggcccgtgcctttatacgtgtatcttgtaacaaaagacccgcaaaccaccagtcttccctatacattcaactcgcttctagacgcaagacgcagcctagacgacctcttgaacagaatacactgtctaaaaaagcattaccacgactactacgcatcccagacaccaactagcgaccaacaaatgctcaatacacagagcataatcatttcagacctatccctttggcgtaaaacatacaatgtctcagtcgcacggctcgaatccaacaaaatatcagaaagagaccaaaccagctatctcctcctacggttgcaccacgaaatggccacaataatggcctcagtctgcctctcaccagaagaaaccgaatcagagctgatatttgacacatacaccgataactttatcaggataatgactggctttgtcgatatatggaaaagctggacaacagcagccttcagcgaagaagatctctctaaactagccaccggacccgacgacctgaaagccatctttcacaatttcaagacgatgtccgacatgaacatgattctggaaacttctctactagagctcctcgaaaaggcgtctacagtcaaccacttcctccaagcaccagactgtggtaagagtgggttcaccgttgagatggggtacatcccgcctgtatactacacggctcttaagtgccgtgttccgcggatccggcgccaggctatgagggcattgagggctgcgccgcatcgagagggggtttggaatggctcgattttggcggatgttttggaggagattattaaggttgaagagggggacttttatgctggcgatgtctgcgtcaattcgtctgttggacatattctgcctggggaagaggatttgcttgtaccgaaggtgccagccgaggcaagagtctcagatgttagagttctcctgccggatgatgttgctgggaatacttatgttagctatcggaagagggctgggggaggcgagtgggtgacttttaagcagaagatcggtatatagggggcgcgatatgctccattttgatcatcatctttcattgtttattgtacaaagtttatatcagccgtgggtcgtgatttcgtaacatgcttttcagtatccataacaccccaaaaatcccgtttcctactgttccaaattcataatgactgaagtcttatgccttgcatactgtattacttcccgcctaccttttgactccgcaaaaatgcagccacctgctcatgtcttgtgacaaaaaacatgcgcttccgatctgacttccaaaccagcacgccaatctccgcggcatactggcagggagcctggtattcagtcaagctggtgaaatccttgaacaaaaagcccgccgtagcccggagacggtcccgctccaactgccataatctgatctgatctgtcacagtaggcgggagcacagatgccgggacacccttgccgttggattgagcagcgctgtgtttccgcagctgtgggtgcgcgtgcgataataggtaagagataatttgatcggccgtgattcccatctcgattgctcggcggacagactgcctggtgattttgccagtgaccagattggggaagcggtatttgaggtttgtgaaaagggagatgagagatatttgtaggggtgatgaggtgtaggcgtagagccgatagttagtttcgatgatgatgaaaccggagctagaaccaccagacggccccactggcccagtgagggatcctgtgacaggattgctcagagcgctcgagtcggatgtaagtgtagttgccagacgggtgggataaaagcgtgttgcgtcggcatcttcctggtagacaataccaaaatcagccaggtccgcgagagtgcgaagttggttgggtgtcatgtggctcttgtcgtaagaagatccgagttctagactgctcaggaggaataggaacgagagaacctcgacgctatccatgccgatggcctcggcgctctcgacatacagaatcaagatatgccagacctgggtattcacatcctgaagcacaaatccgaacccgtctttggtgatatcgacacggttacctcggatctcaaccaagtgtcccgcttggagaagctgtttgacacccttgctcaaattgaccgtgtcacgctgtccactcatcaaggcactcgttccaaccatgtatcccataacaccttcccactgtcgtctagcatattcatccaaatcggcaatcgaggttggggtttgttctggagcttgggagaatacaccgaaagaatgagagtcctcggcacccatcagagcttgtcgaagcgaagcagcgaacgggttggtgaccatgtacgcacggacgttttcacctgtgagggtcgtagaaagaatgtgaagtcgacccaatattgaaagcgcattatctcgttcccttgtgtgaacactgtcagtaatggctagagcaagacctgtcagataagccactcacttcttgctctctgcgttgacccaaacttccagatcagcagttgggagagggtctttcagatagagtagagccatcacaaagcattttgctatattcagtgttagcacaacgttcccttccgtgtgagtaagcttaatgtacccagatcgggcagcatgcgccggaagatcgcaagggctgtggatggttgttggtatagcttatagaaagtcgtcccggggagtccctccaggtactccagaggacgggatgttgcactcgccatagtgagctgtgagaaaccaaattcccaggcaactgaagagaataaggtgcctatgtgaagttgttgaatgaaatgacgctagtacggtggccgaagcggccataagtgcagctccgggatgcccccgagtcaagtactggacttgttgaccctccctgtatcatttctttccatatccagcccatttatcacttctgagaaatggcttctctgagatttgttcgctcggtaatttttcaaccttcactacctatcattcactcttgttaatgcatatctatctataggtgtgggagtccttccgagctacctcgggtctggagcctcggtatggaattcgtcccaacttgcctctacctttgagatatcagagaagaactaacgtcccacttcaattcgattaaaggctgttgagtaatgtgagtatgcgccagtttcccaaaggttacattgaacttatcactgacctctaccatagctccgtattacagccgccaggcccggtgtagtgaactttgagctggatattcagaaggagcatacagtatgtctcgatgtgctgcagtctctctagcgcatgtctctgggaatttttctcgggactcaacttctcacatggaatgcctctgacactttcagaaccgcctgaatatcctccatggaggcactattgcaagcatgggtaagagatccttgcatgtgatcccaaagttgtgatgcttggctaaaatatgctctagtcgatctcggaggctcgttggctgtggcatctcgcggcttgttctcgacgggcgtctcaacggacctgaatggtacgtttatgaaataggcatgcatcccacctatcttctctgtttctaataaatcctctcaagtcacatatttgaactcaggtggcagagttggtgaccgaatcatggccgtatgtctttctccatctatcccgatcagtctctcaatcctactaaacgggtactaactttgacgttaggaggtgacttgtgataaatgtatactacttgacttcttcgtcacaccccctcttctacttgataatggccatcaactaactagccgcgcttagttggcaagacccttgctttcacgaacatcaagttcacgaaccccgacggacatgtctttgcccgcgggagccacacaaagtgtgtatcttatcttatttccgattgtaaactgctaatgtcgcttaggtacgtagcccaggcttggaaggatcctaataactttgtggaggaaatgaacaagcacaagggccaataagaacgaaattgggtattacgatgagaccggagcgttttggtcccaagtcttacattctatgtacttcaagccattgagaaagacatccggagaaaagatcagtcggcattgcagcagcaaatccgagtcgtcagaattatagaagacaacaagtctgttcatatccccaaatgataccactctgcttgagaccagaaatcttacgcaagctcattgcgtgttactatgcagtagctaaccatttaatctgtaaattgaactgctcattggagacgccccccagagtacaaaagaagccgagaaagtgaggtggtctcaacaaactcctttattgagcgctgctgttaccatttaacttatgaaacaattcatacaagatcttcatccccatcatcatcagcccccatagcctcatcctcatccaaatagtcatcttcaccagccggtgccgcatcctcaatggtgatatccccatcacccatagccttaatcttggcctgcgtcatctcgaagacatattgtccaaggtgctcaacactctccattggcgtaccctcaatggtggcgttagcttcccgcgacgaagggaacatctcgccaggagcaagcatgagcttatccggtcgttgcagaagaaggtcgaatgcgggtttaagttcgtagcacgattcgaagacttcccgtcggccgaggatatacagacccaatcgtgcgcgcgagagagctacagtcaaacggcggacgtcgcgtagatatccgacgctgcgggttcgggtgagagaaaggatgacgtctagaaaaatgttagcaattccaatattccgagtgatgtgaatatgcttctgggggaagtcaactcacaatcattctgctctccctggtagcgatccaccgtcgtcacaatcttgggcattccaaacatagggttctttccacagcggtgactcaatacatcccgaatcagagcggtttgcccagcatatgtggctaagatcgaaattttagaagcagggtagcccaagagtcgcatgtactgatacatggccactgcgtactccgcttcgcccaaattctggataaagtggggtgttggctcccgctctccagagccctggtagtcgggcacattgataaattggtagtcgaactggaaaccagcattggcctgctggtactcgggggcactttcaaccactggaagatccccgagttccttgtaccgccagcggaagagctctgcaatgctaggtcgtgcgcgtccctgcttatccaagttgatcactgggacacccaaccgcgccagtcgcaagaagagactttgctcgaaatgggcatattgacggaaacccatattctgaatgatgggtgaattctggtggtgatcaccacagagaacaacacgcttgagaggaagttcgccgtttttcgtattttgcagagcgttgggaatgaaactctcaacttcagtaatctgcgcggcttcttccatgaccacgttgtcgtagtggaatcctagatcggcaatttcttgccggcgcatagctgcatgagtcgaggtcatcgcgataattcgggcctcctttatgaggagatagttcgctttgtcgcgaggttgtcttaggatctcgaagggccggatgtcttccaactcagagaagattcgggcaatgtggcgttcgcaacctgcagcagtatcgatgatcgcctccttcgaggcttcagcttcaaatatgggctggggggcatttgcgaagtatgattggaacgggaaggatgtaacaatctcttcatttgatattccttcggagttggctcgatcccagaatttggcccatgttggctgcacgtaaactgtattgaagtagcctgcagtctcgcatgagtttccatgcgcaccctcgaccccaagcgatgctgccaagcgcatcacttctgataaatagtgattacggttgtcaaggaaggattcgactcgtccatacttgctgtagttggaatcagtgtccaattcttcctcgccgtgacccagtcgcaacaagtgccgttcatcaatgtcaagggcgataattttctggaataattgattgagggcttggttgctgtgtgcaatgagtagcgtccgttcgttggggaagttgtggtaaatgttgttaattatttgagtggtgacatcagtctttccagtaccaggcggtcccacgatgacggtgagtccaggctgggttccagatgctatggcttccacttgggcgggtgtgaatcggattttgttcaatttgggggtgtcgacggggtaggggccagggtttggtggcttgtatgtagaaacacgcatattgctaggcgccaactctgtcgctgcagctttttcccggcgtcgcttcttcggcgcgtggggctcttctgcaggctcttggttaacatattcaagaacgtagggtggaccaaagctagcattctcagcccccgaaggttcaatgcccgggaagctttccactaaatgggaccagtccaaaagggtgtctctaaagtcaacagtgctaagtcggtttggcagctgtgtgtattgagcactagcgggatctccatagcccaggaagatgtcctggagccaggaaggaagagtcatatcagagacaataagcttttgcatcgtctgcaggattgacttgaagttattctctctgccctttctccgtgcaatcacgttaatgagggggtaaatgtctggtttgccgtgggcctgctggtccttgtcggctttgaatgcagccgcatccaagttgacaattaatctcctcgatcgtgccctaggatgagagccatttgcctggccagaatgttgtcgcaatgcgcggccttgctcgtcaagtacttgtacaatctcggccgttcgaagatgggtcatccgaggggcttcaggtgcaccttgttccgactgtgacgagctggactggacggccagaagataaacgacgtcatcaggtcggagtgtgtcccactctcttctaacattatctgcaagccttcctacctctatcgcgatctcagctcgaacaaaagccggatttgttgccccgaccttgggtggtgcgacatcaataatagcaggctttgaaatcgggatggccattcgagagaatccctcaaaatttaaggttccatcgcgtgctgccttcggctgcatgcgtttaacgagggactccaggtccttgcggatttggaaaaatgcttctgatcggtagagaaggaaggagcgataaaggaaatctccgagactcagatactggagattcaactttgggattgccagaggcctcgatccgtcgtatgtctcattcctcaacaaggccgggtcatagagggtttcctccgtcggaagtggactcaacttctcgacagcttcttggaaaggcaccttgcgttcataaaaagatgccaaaacttccagataaaactgacggtctagagtgacgtccgaggattttgggtagcttgttcggaatcctaggtgagagcaaaggctctggagttccgactcgtctagagcagatagctgtccctctagatccactcgctgcgcaatcgagcccatattggagagcgcgagaatcatgagcttatctttgaataatttcattgaggatctttgcagctgggccaattcctggcaatgcaggtcgtaaactccctgcggagaaagagcctcaccagagtaatcatcaattgcaaattcgacaaaatgtttcagaagactgtggaagtcacgtagaagggcgttgtcgggcacatggtagagctgcgaaaggcgaataaccgatagaaggttgaggtcctttaacaacgtgttcacgtagcgcctagtgggaagctgactttcgagatcaaccaagagctcaaggaaacgctcacagtacagcaagttctcagtctggtccttttcgggtccgttcaacctacgaaggaaatccaaaagcattgtatatagccatgaacgttcgaagcgcatcttcgctttcaccgcttcatctccagcctcgtatcgcttcccagaggccctccacgccttttttaatgtcggggcctttgcaataatacgatctctagtctcctcactggccaagttgtgccagatcgagatagaaacgaggggcgcgcattccttgcggattaggacgttctcgagtgactgaaaggcgctgattataaacgatatgatagagagtcgagagcgagtcggaagtgaatgatcaatgctcattgagagaatacggtggaagagattggagaagtcatcagcacggtcggagaagatatctgcaactgtcagcatcgtcacgttatagatctcgtcgtattgactcaccccatatcggtaagtgctcgcgatgttttacactgacgatcaatgcaatcaacagtacgtgatgattcgacgcatcctctgtgtaagtcggccaaaggaacctcgagaacagttagcgttagccttggaggcatgactagagaggaacgtacttttcaagaatgttcaagttctcaagaatcaatagcgagtgactgttgaaagcctctgcttccaaaggatcccacaattgcttcttgatgacatctggtttagccttgcggaccttcgtgttgagccagtgggccttggctagctgcacccacgggttttcttcacgaaagtccaccactgtaggcctggattcgagactctgcgccatcgcaggagtcagtagtttccttaacctaataaattggagtggtcaaggaggggttgattggcgcagtcgggaacatctgcatcggtgaagctggggggagcttttcaaaaagtcttggctctgagttccgccgagccgcagtcctcaatcaatccgaccactttgtttcccttcttcctacattcatctaaccttttttcttcccttcgtaacctctcttcaaagaacgactgaggagaacccttgaaaagaagctgaagaccgcaatcaaggaagtcccaaggtcctagaagacactcgacaaggcgcctacggacacgctcgagacaacacttcaagacaacccctcaagggccccttacaaaggcgcctgggtagacgcttcaggaaatggcgaacgatgatattggtggtgttcaggtctacaaaagactagtggacaatctcctggatcgcgccgcgcaggtcaagcccgacaagcagatcgaaccccccttgaccgaaacatacctgggcgaatcgatatggcaagtgccgtctgaggatgacaaggttacaaagcacttaagcccacagactaagcttgcggccgtggaaatcgcgtttcgcgagaagttctatcgcgttttggtacggcccgtacaaagctctagcccccagggcatcgttaacagtttgttataggcctcgacttccatcggtgaccctgctttcattcaaatatggaatctccttgacattgtctcgatattttctgataatggtcagtctccgcagttcctccgcagtccctaccgatctaacaatcaccagaacaatgcgaacccggtctgattttctggctcattgaagagctcttggatagtcaaactatccatggctgccgtaaggtgtttgattacttggagtcccgaagagagaggaacaccaaggtcagcatggcccctcatctactggatctgttgcaaagctgaccccgcacaagaaacatttcaaacagaaaagcttagttattctacgatcatgcaacgagcttcttcgccggctctcgcgcgcagaagatacagtgttttgcggccgggtgtttatctatctcttccagagtttcccacttggagacaagagttcggttaaccttcgcggcgagttccactctgagaatgtcacggcctttgacggaattgcaaatgagtctaccgataagcaggagcaggatacaacgatgactgaaggggctgaacccacggcacccggacaggcagcggttgagacctcttctcagcaaacatcgaaagcgcccaaggtcgttgtttctactggcgatgagaagaaatcagatgaagttgacttgaatgcactctacccgctcttctggagccttcaggcctatttctccgcaccgagcaagacgttcgacgctgaacggtttacatcatttaagactggaatggaagctacgctagctgcattcaagagcatcaatactgagatggaaaacgagagctctgcccgagcatcagaagatgcccgcaagtcgaacaagcgcaagcgcatcgcggatggtactgaagtcgccaccagtttcaacccgaagtacttgaccagccgggatctatttgacctcgaaatcagcgatactgccttccgacgacatgttcttgtccaggctctcattcttctcgactttgtgctttctctcacatcaaattccaaatcacgcctggcgaatacgacgaacaagtccgttctttacggtttcacattgaacgaggaggataccaagtgggcgaccagcatgcgaaaaaacatcgaggaatatttgcaacaagggcccggagggaaattctattatcgtatggtggacacagtcttgtctcgagacaagaactgggtgcggtggaaagccgagggctgtccattgattgaacgattggccatctcggcggcggagtacaaggcttcccgcgagcatgctaccaaagcgtatgccaacaaacgccttcgtccgtccccaatgggctctctcgatttgaagttccttgccgacaccgaggcgctggccaatattgaacgtctcaaggaatccgaccgatacaacgttccttccgccgactcgttcttgaagggcatcatggatgatgaaatggacatcgatatggcgatgactgacgaggacaaggcgattgccgagggcgctaaagccagcaagtcctggcgaatcttgcgtcttgctgcgaaaggaaagcttgctgcattcgacaaaattggagagggcaacaacctacaggtcttgtttgagagtgctacaaccgcggatgatcacaatgagctcagttcctccggcgataccaaggatatctcccaatccctcgatggagctcagagcctgcctcttggaaccaaagggctcaccgaagcgaccaagactgctggatccgaagagcctgttgaaggcaaagtcgagacagctcaggatcttcacgatctgccccagggcacagatgaacgggaaatgcaagtcgaaaacaaagacgtcatcagggaacaacaagacccaagcaccgataacaccagggaagaggcccttgccgccgctagcgcctcgagagaggactctgccacgtaaggtcagattgtggcttgaagatattccgttggatagtcaatggcttggaccccctttttgtccggagaaaatcctccaatggacaccatctaaggcggtcacgccgcggccaaccacatccagattatccaggcaacctgcaggattttatgcatcaatatcacgaagccgttggtgccatgatctgggagcgagattaccacatccgtgcacctgcattatctgcgatacatctgctggtacggttcagcacttggtttctctttttcaaatacgaattacggagtgcgtcctaggtcatccctgctggcggagttgaatcttcctctaccctaattgggtgtcatttcacgagcttcttttttcttttttctttttatttcaagaacccgcctattcagggtcgccctcggtccagattcgtcggggcagaattgacaaagatggcgcttaaacagaaacagaaaaagaaccaattaggcccattggctgattgcgggcacgactcctgaaccgaatccggcattctacgggcagcgggccaatgacatacgacctaactatgttgtacccaagactaaagacctcgatgaattagctaacgtggagaccatctgggcacaattcttttgatcggcaactctaatacaaatgacttgaaagggttcctgcatgaagtacggagcagctaaagtagaaaaaggaataatcgtgttctgtccatgttctccagacctcatttattttcacacgtggcatgtttagtgtcacggtcatgtttcactttttttctatttttctatttttctatttttctatttatctttttatctttttatgtatgagaaagcagggggtaaggattaagcgacttcggaaacgagatcagtagggaaaaaaaggagagaatatggagtacggagtaaatatccaggattacggagtacattgtacacgagatcacaaaagcaaagtgtccccattgaaccattacatgcagaagtgggcaccatgtttctcccctgtccacttgggtttggccccctatttttcgcgagcctagggaagaatccttcgcttcgacggagtagtttgcgatatagtacactatattggcgaatagcgtgcactgatcgtctagcgttcgatgcgcaacacgtataagttgtgcaatcaataaatcccaagaataaaagccacatgggaattggaacactatcgacacaagcgttgagtttggtctccaccagtggaggctatacaagagatagaaggggacgtacaataacggtagccatgtggttcgatctgatgcactggccatgtgggtatgggacggaggacggagtatggatgtaccgacgagtgtgctggacataaaatccgtgtctatcttcgttctaatccggtttaggcaaatgttgatgttctttctagatcgggaattgtacagatatatatatataggtataggtgtatgtacatggacgtgcggaggcactcacatactcgttctattctatataggttctatccctattttatatgttgccagaaataccctgtatactcgtatactcgtatattcgtatactccgttatggaatccgccaagagatcgacttgcgtcaccttaatcttctaaagtccgatggtataatacccaggacgtgtaagtatgcatcccctgtacgagtacgtggcttgctactccagtgtacggagtacggagtataagtggatggatgcaatgcctcggtacggaagagataaagtcaaatgcctcgatcgctcgatctggttaccccgcacagcacgttccagaagggagattgcaaggacgtacacatcatacgttgcaacggtatgatcttgatctttcctttaatttgaatttggccgtcagggttcaacacgaaacaaatcaagcagaaacaaattggcctacgtagagatcgtcactccgtggtgtggatcgaaatccaacggctccgagttttctcctccgagatccacctgcttggggaacctaagcggtatgtaacttatccgtacccttgatatacatgatatacaccgcgtacagggaggcaggcgctggatatcttcgaagaaggaaaaccgagaaacccgagaaaccgatgccccaggtcctatccgatatatccgatgtccttcggcagaagtcctgacccacatggatctctagaaaacgaaaagatgtatcattgacgagtaccgttgacgcctcatttcacctgcgactcgaattgtttcatatccattgtggagatttccaggggagctgtgtgtctccctacaactaccgggtggtatatcctcgctaaaaaactccttaactaggtatgtaattccgagttcccgaatgcgacggcgcaaggcccgcttggtggtctttcctgaagaaggtaatgcagctctcgaaacttccttgacgaggctcttccaaaggctatcgtacaccgtttcaagtattgctcatgtggttctacattggttcctttgactcgggcagtcctgatttgcgatgttgatgctccttatatagagattgtgtgtttgagagtcccctttttcccgttttgccaatttcctatttttatttttttcccattctccaagccttttgggcgctatctccacccagccctcgactgcttcgcttctttccgaggcatttcacgatggagctgtggcgggcagcccgctgagtggctgttcctcttggtccttgatcgatagccccgagggtccgctcaggatttatggatcttcagcacgccactaacacagccgactggcccttcccacatggcctggtctgcgcatttccggtgagggtcttacatctgtactccgtaacggttgcaggaatcaggctttttgtttgaactctctcgtctgtccgacggattacggagtatacagatcccagctaagcttccacggccaattccaaacttttatactagaaacgaaaaggacatacaagtaccgcactgtctcttctctctcctttatcttcccttagtttcgcttttccgggtgccgggtcccgcgggacccattttctcccctttatcgtccaaggttgagctgagttgacgtggtggttcccagccttgcaacttggacgattcccacattcccaccacatgaatcctggtcgctcggcggtgtccgttatggtgacagcgtcttgtttggcatactccgtcctccgtacaataggattccatcggctctcttaccccgtattctgtcggcatattctgtacctgtcacttcgtatccagggacgcctgacgggtaaaatgggcattggatcggaggctacgattttattctccgagacgatccttttagtttctgatatgatactagctgtctgtaccgtcccataccatctgtaacctgtgttttacaaacgaggttaacggccaccgctatggaccgtttggtataggatcttcgtccaggcaaaatagatcgaatgttgatctgtggactcgagtctatgttatgttggactttctacattgtacatgtacatcttcgtctcatgcccctcaggctccctgagaatggatttcgctgaacggcctgcatctgggtttttccttttgaaatggaatgtttttagagaggacaggcctaggatgaatagctaccttctaaccatactatcccatgccatcttgtatacatgggatttatcgggtggccaaaatggtggaccctggcgccattccgtttaatatccctgtatttccactgttacctcgcttggctattaaaacctatttgcctcacaggatatctccggtcgatcctagtctagcggcattgtgtgtccaggtaccacatttcattctggtggatgcttctctctcaacatcttatacagcccagtaactgcccagctgcgtaacgatcatcagaatcaatcggaaccgatctcagatccaaagaaaaaggaaaaagaataaaaaaaaaaaaagaataaaggttggcgacagttgtcccgcttgacatcttaccctcgtttgggccttctttttccctcttttctcctcttcacttgacacgcatactttttggcgcctttaatcgcctttcttattttctctaaatcagaaacaaagcagtcttaccctttactctaattgccagaagaaaccctgaccctttttttttacggcacttccatcagacccaccaacgtctcatatcggggggggggggtgtctacggtatcctttttgggctagaatttctcctattgcttctgttgacgaaagtcttgactctacttctttttccttttcaaaagagaattcgtctttggttttgaattatcgtgggtaagggcaacacacacacacacacacatacacgcacccgcacccaaactagacccttaccatgtcagtcggtggcccttgtctttggttgccttctttatcttcgccagttcattcgcccctttctgcggtttcatctcatctatcagcccgcaatagcgagagactctctttagggcctaggactatctcaccacggctatctgcgcagaagaaagaggagcctgccgttcctgttcctgtgcacgttcccgctcgtcctgtggagatgcagccgactggttataaggctgaaaacgccttgaataacccggcggcacagcccgtcagcatgggctcagcgccgtacttggagagagatgtttcacaggatacggtcaaccaccgcttggaggcggcgaaacaggatatgcttccgcgtgttaaattggagatcccaagtttgaatcagcggggctttttggctgttcagcccctggtcgggcacggcggtcatcccgaggaaatgggtatttcatcgttttcgggctcgcatgaccagagagacgaccacgacagagaatcgacaatcagtcctgatgacgataaggatatgatgggtagcgatgacaatagatcgccttcgatggagaagaagaagatgaagcgttttcggtatggaatttcttatcttccaagtaccacgcatggttgctgacagaactatagattaacacataaccaaacccgatttctgatgagtgagttcactcgccaggcacatcccgatgcagcccatcgagaacgtctgtcgagggaaatccctgggttgaccccgcgtcaagtgcaagtctggttccaaaataggtagggtgatcaactagttgaatcgtctgtccttgactaacgtaggtgtactgtcaggcgagcaaagctcaagcgtctcactacgaatgatcgggagagaatgctcaaatctcgagcccttcctgacgatttcgataccacaaaagttctccgcacgccctttgagggcaaacaatcaggtatcacgccagtggcatctccacaaggctatggcgttccgaatccggatttcggggctttgagaacactgcgtaccgattgctacgctcgaccaaatgaagacgactatctcgtctcacctctcagctctgcatcgacagcaggaacctacatgtcctcgactggacgaaacgacagcatgtctcagtcgaacatgatgttccgtcctgctgcgtcttcctccatgtccgatttacatagaaccatccgcaacgattacccggtcaccaggtcaagtagcttgtccgatgcatcggcccatccatcgccgtatgcggggtatcctatgcacaatcgtttcgcggggccacagccaaatcagccagctctaccctatatgagacgacccatagaatatgccatgcctcgtcatccaggcatgggaccttatgatcaacatcaaccgtttgagggctcggtgtcaccgacagacactcaaggctcacatcttacttatgacataaacaatctaggttagtatctttttccttgcctcgacattctccaacccgatttcctaacatggttttatacaggcccgcaacaacagggctacaatcttggaatgggctctcaattaccaccccaaggccgacctatagccaccatgcagaacctgccagtctcggcagcacaaaattatcggccctattcctacgacgccaccgcaggcccaatgggtacaccaattccttacacacaagcaaatacctcgactctgagtctcccaacttccgagccatcatacaactaccccaactatatccagcagtgagaggggagtaagacatccttgaaaaaagtcggctgttacttgtctgctatacgacatgctcgttttgctttccgcattttctccttcgtctccatctcatcacctccaccttttggttaactggttagctgggttaaccaaggatccgcgatctatatcagcgagtattaatcattaatcgttctcatagcgttcaccgtttctggtttctgggtttcttctttgtcctgtgttatcaaccatatttttaaaatctgtttcttgcatgcatctacgtttcgtttgttttcatatcatctttccgttttgtcgcgtttctttgggtctggtctggtctggaatctagcgttcattgtctgggggacagtttgtctaatattaattgtttctgatctcgctgcatagcctcggggtggaaggtcaaaatggtatagagatgccactgtgtttagaagcagacagaccactgagtctacaattcacttgaaccaataaaccaagttgtcctcgacaattctctactttcatctactttcatgccgccgtaaacaatccaatactcgacaaattatgtaaggtcgtagctccaattaagcagttccaacctccccacactaaccttacaagtacaacccagcaacataggtcatccaaatcctgcctgtcgaatcagagtcaagacaaaagtaatcaaattcttcttgtctcagctcatccaccatcaggccacatcgtcccgccactcaagcgacgtctatttgctgttttccgcaatgggccaatcagcgtccacgaaagataacactgtaccacgtgacacccactctcacagccaatcaaggttcagctattgataatcaccactcatcctctgacgcatgcagaacagtataaaggaactcgtaaaagcagagtgttattttctttctctcacacactctcatcttgactcaaagcaatatcatttcgaaggaatccatccatcaatcttgcaaactcacaaactcacaagttcctcaacttcatcttacctctcgatcttcagaaaccgacgtcatatcaaatcaacccgccaaaatggtccaccccactaccacctgctgcaagaccacacaggacggctcctgcgtctgcgccgctcaggctaagtgctcatgtggccagcagagcgccctccactgcagctgcaacaaggcttcctctgagaacactatctctggtccccgctgctcatgccgtatgtgatttccctactctagtgatttagaataaactttatactaacattgaaataggcactcgcccagctggccaatgcacctgtgagcgagcggtcactgagaaccaggctgtttctggtgagacctgtgcctgtggcagccgtcctcagggtgagttttctcctactacgaatgcgattcgtgttattcaatgaatatcctgctaacttcggctttagcttcttgtacctgtgagaaggctgctgctattgattccgcccttgaggttgacttcactggcagtgcttaagtgacttgattcacttgtactttttgctttgatggggctccctatcattgaaaattgcatttttgtccccgtcttgatggggtggcgtcttgggcttgggcatttttactgggtgaggttgcttagggttatcaataactgctggatgagatacgagatgcaaatttaatactattcacggcctactacaatatacagagaataagttatcacgagtaacaacaggttatattcaatgcgccaaagctgtaaaatgggcttgggtggcttcgaaacgggaatatacatacttcttaaaatagacctacgtacttgatttcctctgccacttcttggctatccctttccgttttagtgctcaggctttgccgcttttgctcactgagtagaactgagcatcacctgatcattacataagccatatgactcgctcactgagcgtcacctaagcgctctgatttgctcactgagcaccacctgattattacataagctcaagacttgctccttgctcaccggagcaaagcacagggagcagctaagtcagcagctcacctcaataaaatgcaccacgctagccccatccaaacgcagtcgttcacccggcactcttgaccgttgtcccctcaacgaaaggctggtgtcatcaatttggcggtcgatcctggttgttacgcctccacctggaaggcaaatgcacagtggggccacattattggctttactattctgcgcctatgccactattcaacctcgccgagctctacatagttgcggaatatatccaaccctccatttttggttctacaatatctttacgcctctacctagaaggcaaatgcacagtggggccacattattagctttactattctgcgcctataccactattcaacctcgccgagctctatatagttgcggaaaatacccaaccctccatttttggttctacaatatctaggaatatcttagaaaaccctagttagaggtttataaatctagtttagtgttttattctgattttttttagttgattttttaacggactatcgctcttgctcccgactgcttactcctaggaatacgacttcagctctagtgatagatatccgcaaaaatattctagacctattgattatacctactgtatgatctagccgcctataacgaaatttgcggcccctcatttatctaaaatattctaactagcaatcagaaaatacctcattctaactaaagtctgataggacttcctaggagctctcagacatttcgtgccaccacgatatgattggtgagataatatagatcctaggagcttaagtactggtacccactcgcgagagccgtgagtgctaacgctgagagtcaaagtatataaaagaaatactgatcccttctagagtgaacatatccaagtttcaagcatttctactcaaggtcttatgaagtctgctcataagttcagcagccttcagtatcctgggtctgtctcttgtcagccccttagtaagagcaaaagcctaactattatacagattgcctgatgccacaaagaaaaccgataacctggtcgatattcaagatctcctattcgatgagagttgcaggaccgtttcctgcataatcctgagctctgagtttgttatatatggccgaggcctaaatggaaagatgtaagtgactctcgcaattttaccagtgggagcgcgagaatttgcagggggcctgtggctaatgtgactatatattatccgtcatgccacgataatcgagagcctcgcgtaccagttttcagtctgtgtcattctactctgacttataggcatcattttgccccctggccctagcttgtccgaccatgcttcttcctgtcgtaggacttaaaagccttcaatcgagtcatggtaattgagaaaatcagaagagcttatctattgaagcgaagacgtggcatcccggtttgttgacctatttagacttgacgagacaaccaaaaggccgttttctattcgctgcccctcagtgttccggcttcatattgcagacctggataaaagtctctagaactgacaagacacccgctagttatcttgttatatttcctatgtttgccaggtcgatgctgttagattacactgttttgatttgaggttcgtgcaaattaggacccaagttgcatcgtcgaaattaattatgcactaacttagaaggagagagagagatgaatgatctatgaaatagtagggtatttataccctgtagatgtagcaaaaaaacaagaatactagtcggccggcagtattttcagtaatttttccagttggtcttctcaaagtgtttttttacctactaagcctaatcaggaattttctgcaactttatatctatattcaaaggataacattgaaccttgcatcctattcttcttctccattcattccaagtttcagtctcactactttgttcttcttaattcattctaagtttcagtctcacttctttgaatctcattatattcgatttatcttcttcaaacttacccaccatgtccctccaagccattcccgaacatcatccagatctcccatccggtcctggtgttttcacactagaacagatacgatgccttgaagaggctgcaatcctccttcccgagcctcagccgaatacatccacaaacgccagtggtaaaagaaaaatttccgctgcattcagtgcaccaagatctatgtcaagctcatccaccacctcgtcgtcgtcttctgcgtctgttgccacccatggtttccagcccaatgtcatccgaaccttcgacatcccaatggcagaagaaagtgtcgaggtgcttgagtatattgggttcgtaccggatgttgccagactgatctatgaccgatattgcggccgcccaagtccaagccaaaatcctgatgacctaatggcatatgtcactgcacatctcgcctctcttagccgacgacaatacgataacatgagccatcaggaggcgctcgctgatgttggtcttacgcaccaaattcaaggagcaatcacggacccgagattctcacacatcttcggtacccagaccctcacttactgggcacaagataccgttgaaaccaactatgccgctcttcttcgtcaacagcaactgctacaaagtcatgcaaacaagcgcatagctcataaaaagaaacataagcggcccaggcatgagccgagccgagaagaccaagacccatctgagcagcaacccgtgaccgcaacgatcaacatgacaccccaagatttccagttcccagacacatatgtgatggttcagcctgatgccaatatcctcgccgatcacatttctttatacaagggcaaggcatatgatgaattagggccagcgggtgatatcattgagagtgatggaacagtcaacctaagaccactcagcacataccccggcggagacttcaatttcgattttaatgcgcaatactggacccccgaaattgaaacggctgaagagtaccgcaaatttgcagaaaggagaagccctgcagccgatacctgcattattcacattcaggttcagcgaccattcatcaacagcctccgaatggagaatctatggtattctcccaactggaaagagtacatctggacttgcaggagacaggctacccctcacccgaaattcgaccacctctggcgacctgggcaagctaatattgtcaggggccccatctgttctaccctcagcacacagctagtccgcatccgcagagaaaacatccaaagtcatatcactgaggacaacgtgatgcgattgctgtctgggagaaaggccactcggtgggtattcgttcaacgcgatgtgattgatcggttagcagaacacattcgagggaagatgcatttcatcattttcgaagccgcagttcgtttctcatgacatcggtctagggcccactttccgctttgattgcagccctttttcgggtcgttctttatttatctgttgacatgtttctttctcgaaaaatatcaccctctatggtaaaaatttactcagtgagcctgactctgagcgccctcgtaaaagcggcggcagctaagataggaaagccccgcccggtagaggaaaaatggtacgtataactacttaggtacaacgtgtcgagcctcaaagcttgtttgcaatgggaagatgcagatttttaaaacaactataatccggcctcttgcccagtgtttttgctttggattttccacatggaatcagtctgtccagacaaataaataactacaatctactccgtacacacacttacacctgccatttgcaccgccacatcggatcagtattcctccgtcgccacataccgccacagcggaaccgggctgatcgacagcggaagtgacccaaatgaaatacagagcggacaagttacggggatggactcatctcgacttcgcgtgctgcccggctcatttatcataggatctctaatttgagcgctattttgtatgttgtcgcggttcaatcggatagctccggtcccccaccaaccaaccagtgctgacaagctccccagaattcaaatccctcaacacaacacccaaccccctgttttccaagaagctcccacgagcccggaaatccaccatccgacacgttgcatggccaatgccccataatcgacacgccagcataaccgggacatggttgtgtgacgctgtgcgtccgatcgcgaaccccctgaggtgataatcccgcgtggcatgcgagggcgcacctcgaccgaaaacccccgccatactgtagtcgtcttttctttcgcatccgtgggctgataactgcactacgctatcatcgccgctatgtcgtcaatgcgagggcttgtgcagttcattgctgatctgcggaatgcccgcgctagagaactcgaggagaagcgcgtgaacaaggagctggccaatatccggcagaagtttaagtctggcaatcttaatggttatcagaaaaagaaatacgtttgcaaattgctctatgtctacattcagggttacgatgtggactttggccatctcgaggctgttaacttgattacctcgcctaagtactctgagaagcagatcggatacttggctgtcacgttattcttgcatgaggagcatgagctgcttcatttggttgtcaacagtattcggaaggatctgctcgatcataatgaattgaataactgtttggccctgcatgctgtggccaatgtcggtggtaaagagctgggagaagcgctcggctcggaggttcacaggctgctcatctcaccgtgggtttagaacggtttttgttctgtttatgattattctaacaccttttagtacctccaaatctttcgtcaaaaagaaggctgctttaacgctgcttcggttgtatcgaaaataccccggcatcgtgcgaaacgaatgggccgaacgaatcatatcgatcatggatgaccctgatatgggagtaacgctctctgtcacctctttggtcatggcactagctcaagacctgccagaggaatacaagggctgctatgtcaaggctgcacagcggttgaagcggattgtggttgacaatgatattgctccggactacctctactaccgcgtaccatgtccatggatccaggttaagttcctgcgcctgctgcaatattatcccccatcaggtatgtttagtgctctggcaaatcgttactcggtttctcacatacaattacagaggatagccatgttcgcgagattattcgagagtccctctcccagatgatgcaagctgcaatggaaacacccaagaatgtccagcagaacaatgcgcaaaacgccatccttttcgaagccatcaacctccttatccacctcgactctgagcacaatctcatgatgcaaatctccacccgtctaggcaaatacattcagtctcgggagactaacgttcgataccttggtctggatgcgctgacccatttcgccgctcgggctgagacccttgacccgattaaaaagcaccagaacattatcctaggctcgctccgagaccgcgacatcagtgttcgtcgcaaaggattggacctgttgtacagcatgtgcgataccagtaatgccggccccattgttaacgagcttcttcgatatttgcagactgccgattatgccattcgagaggaaatggtacttaaggtcgccattcttactgagaaatacgccgccgatgcacaatggtacatcgatatgacattgaaactgctctcactggcaggtgaacatgtcaacgacgaagtatggcaacgagtgattcagatcgtgaccaacaacgaagaactacaagcttatgcagcacacactctgctaggctacctgaagtctgattgccacgaaagcttggtgaaaatcggctgctatgtcttgggcgagtacggccacctaatcgccgaaaacgcaggctcaagccctattgagcaattcctggctctgcaggccaaaatgttctccagttccgacaacgcgcgggcgatgatcctctcgtcatttgtcaagtttgtgaatttgttccccgaaatcaaaccccagctcttgcaaatattccgcctatacagccattcccctgattccgaactgcagcaacgagcatttgagtacctgtcgctggcgactctcccgaccgacgatctgctgcggacggtctgcgatgagatgccgccattctcagagcgaacctctattctactttctcggttacaccagaaaacagcaggcgcgagtgagaagaagacctgggttatcggtggcaaggacgcgaatgcggacaagcaggaaatgctcttggcacagaacaccggtctcaagcgcaccttcacgacaatcgtcaatggtacgcgcactgggtccggcaatacaccagccagcccggcaagcgcgtcgaatgcggccagttcatcgggcgacttggcaggcctcgatctcagcggtcccacagccccagctcccaacatggccagtgctgctcatctgaccccagaatgggacatcggctacaaccgactgtatttctcgcgcgagggtgtgcttttcgaagatgcacagatccaggtcggactgcgctcggagtaccgcggtcctatgggtgtcgtgaagctttatatctcgaacaagtccacgtaccccatcgggtctcttaccaccaccgtcgacaacccggcctctcctcagttgaagatcgacacgaggaacctgcccgaaccaacagtcgcggctgccgggcagacacagcagactctgttctgcaccgctcatggtcccttcgcggatgcgcctaccatccgtatctcatacttggccggtgctctccaggcttacacactccagctgcctgtcctgatgcatcgatacatggaatcctcgtctttgtcagccgaggagttcttcaagcgatggcgccagattggcggtggacctctggaatcccagaagacctttgccttgctgggtaagaacaagactaccaacgagaggttcactcggaggattgtcgagggattcgcattcaagattttggatggcgtcgatccgaactctcagaacattgttgggtgcgccgtgtaccaattcgaggggggtaagacgggctgtctgctgcggctggagcccaactacgagaagaaggtatgtatcagaagtcttccaattcgtttcgtattgtcatgctaactctttcgttcagatgtatcgcgtcactgttcgtgccacccaagaagaggtccccgggccactggtcaaacagatggagctgaagctggcgcagggcatgagagcagacgaagccttcgattaaagcgtctgcaggtgatatggaagcattcatgtatatctctaattgaattatcgagtaaaatattagcaaatgttcctggcggaacatcgcatcttttgtataatccttgtcagtttagtaacaaatagaggtgcgatatgctatacatgcatctaatgatcagcattctcagcggtgacaccagaagcccaaacacttttaatcttgacgaaatcgtaactcataaccacccccagtcctaagtcaaacaacattcgcctccgccttaggcggccgatccccaaagatcgtagttccaaccctaacctgatcactaccaagagcaattgccccctcaaaatccgagctcatacccatactaagctccaattcagcctcatccccaaccaacccaagctccttaacaacccgatccctcgtctccctcaaacaaacaaaatcctcattctcattctccaccgtcgtcgcccgggaccgcgcaatagccccaatagtcatgaaaccctgcaacttcaaccggggacactgctcacgaacatatcgacacagcgccggcgccgcagcaggctcaacacccgccttattctcctcgcccgacgtattaacctgaacatagatacgtagcctcccatcctcgtcgtggttcgtagccgccacctcagcccccctctccccccaccccttatccagcaacttcgccttcttttccgagtccacgctctcgacagcccacagtccgcgcacgtcccgtgccagcgtcacgcacttgttgctctgcaacccgccaatgaagtgccatttgatgcttgcgggcagcagccgcgatttctcgagtagttcttgaaggtagttctcgccgaagtgcacttgcgatcctggcgcttggtgcagtgccaatgcgtcggatgcgggcttgagcttagagacggcgacgaggcggattggtttactggggattggggattggagggccgctgtgctcactcgggcgcgcaccgatgttaggtttgagaggagtgtgctggcgcgtgctggtgttgctgggttcattgttggtggttgcgatggtgtgttggttgtcattgcaggttggtggggttgttgttgatgttgttgatgttgtgttgattctgttgattctgattgttgttgacgtatagatttgttgttagggttttgaagaatttcatataagttcagatagggacttcaatgatgtgttcagtcaattgagttgagatgaatcaaatccaagctagtcaggaatagaaagttagactttcgataagggccttaggcagcaatttcctcggagaatattccgtcgcacgtgactcacctgcgccacatctggccttgcgcctcaccgtctatttcgcttttccgtttgcatctttgaatcgagagatccgtgagatcatctacatcctaagaatgtcaactgacatatggagtcctccgtacaaactctatttctgcagtcatccggtaggcaatcccgatgcgagatcctggcggcaagccagacagacctctgctccaatcacagatatgcatcgtcggaaaagagactgcggagcgccgggtatgggcggatcccctcagttcgtctcaacctgtcaggactgactggctctcggctggtcttgtcgatcagattgtcgccgttgggtttcaaactagtccctcgatgcaggatcttgatctctatttttaattccgtccaacctgttgaatcagaaaatagccgcctgcttgtctttttctagtctttcttctgagactcccatttgcattacccccagtccccaccagagcgccaagtttgctgcctagactacctgtccaagagccaaaatagcggtaccgagttcgatggcgccctcggcgagaatacgacctggtgtcagatgcaacctgccgccgacggatggggtaaggtctaggcaaggtataagcccactaagaatataactataataatacccatcataataagcaaaaaagtttatggtctctttgacgtcagctccaatcaatagccgtggttccattcatagacgcggtcaatgactattcactcatcattacatgaggcctagaagaacttaaagagctaataggctgctcttctttgcctattctttttgcttgctgatcaacgtcgtcaactctccatatcatcactcatttcagctggtctgaataagccttcaaatatctgagcatctcgacatcaccagctacaaagcatactttccgaggttttccgattaggcttactagctagtcagcgacgctcgaaaccattcacacgccatttacacactgggcatttgacatcctcatatccttgccatacaccatcatcaatcttcatatcgcagtcaatctgctttacatattcaactaccaccaagtccatatcgtccatcgtccatcaactgtcaactgcaactgcaaatatccagaacttactgtgggaatcggcaggacgccccgcaacggtcaacagtcaacagtcaactgcaacaaagaagcatccaacaagagcattatgtgtcgccaatacttcacactctacgaatggtgccaatgcgaagaagacgccggcaacagcgtctgtgccgcccatcgtcggaataattgcccgggcatcagcgtcgagaccgtgcacatgcattgcttctgcaactcgcatgccacgcgtggtttcaaatctgagaaggagacccgcaagaaggagaataagaccagccgccgatctcaagattcccttggtgaaaaggattctttcgggcgccgttggtatcagtggtatcaatggcgaggtctgcggtcgcgttagtggcaacatctacatttgacttgtttttctctctcttctctgtctattatttttttaaagctttggtgttggggggttgggatctcgatttagatgagtttacggtcttccattacctggatacgatggtctagatgatctacatgagatccgatttttgcttttcttgaatttgggatattttcgactattctatattagagatgagttctaataaagagcatgaattatgaatgtgcattgttgcaaaagctaataaagacggatctagttattatacaataagaaccaagtagaggcgatcaaagaagatcaataatcaattcctcagttcctcaaatcttcaatagaaatctaagattgttgtctattgtatgtcgttgtatgtcgttgttctatggtctgctgatcgaccgaacccctaccccatgtggcttaacccaaacatgtgaatccccacccttcctttgtttctttgttgcttttgattccctttccctattcatcgaacctcgacctatcatctcttttcattccttgaatgacgagaaacatcgtatattgaccctttgtggcagagtcgaaatctgcaagatggaatacaagcccccctccactgcgggggacccgccattaccaggggacaatggtattgagaacaacaataacgatgaggcgcattgtgaactgatcgattctctgaatcgcctgaccctggcgacagagacaccattgcctttatcacctcgtctttctcctgttccatcccatcctctcccctctagatttgttcaagccgctcgagctgtacctgctattcctctgcagcccagtgaacctgttcaagctgtctcgttacaatcgaatcaacctgtgcaatctgtcccacaaacagctggctctgtttctgttcgagacgaacgacacaggtcaattgcatcgctacagaagcaaaggtctgttgcatctcttcgttcggtctcacaaccgctcaaaccttcatctccaactcctggcccttcacgccgcacatcattcacctctgtggggtcgccagccaccgcagcctcagccgcgatgtcccccacacgccttgtcatcagcccggctccagaagctctagttccgactgctttgtctgtcgctgctgcgcatttctcaaaggagcttgaattacaccggtctggtgatgtcaatactaaaactgctgttattattcatgacgactgctatggccatcgctactcccagcttgaggcgccaaaacgaactatcgacagcattgtcgaaagaccagagcgcattcgcgcctgcgctgtgggcatatctgcagcctatgtccgcctcggctctcgatatgcggaagatctcgctgcaaatccaagttcggacttggacgagattgatgtccctttccaaattatcaagactgatcgcaaggtgcatctgtctgatactgccgttacagatgttcatggaactcaatggatgtcagaattgaaatggatgggggaccttgcagaatcacgtctcatcatggatggaaacgaacttgccagacaacggacggaggcagacgacggcctcgggacaagtggtcctgccctgaatgccaacgacctttacttatgctcagagtctgtgaatgccttccaaggagccctagggggcgtctgcgagggagtggatctcgttttcaagtctggtccgatccagcgcgcattcgtctgcattcgacctcccggtcaccattgttcagctaacttcccttccggcttttgctggatcaacaacgttcatgtcggaatttcccacgcagcaacaactcacggtctgacccacgctgcgatccttgacttcgaccttcaccatggcgatgggtctcaggatattgcatatgaccacaactccaaattactcagcaaaacacaaaaagctgacttggccaaaaccgatgccacgaaattcaaagagtatgaagacgctcctccgtacagcaaaacagctatcggctactatagcttgcatgacgtgaactctttcccttgcgagaatggtgagcgtgacaaagtcatgggtgccagcctctgtgtcgaagcacacaatcagtccatctggaatgttcatctcgaagagtgggccgatctcgatgagttctggaaattgtaccgcacaaaatacaatgcattgctcaccaaagcccgctcattcctacggcaacgtacaatggaactcagtcaagagcggcaagtgaatccgaattccccgctgcccaaggcagctatcttcatctctgccgggtttgatgccagcgagtgggaaggcaacggcatgcaacgccacagcgtgaaggtgccgactgaattctatgccaggttcacggcggatgtaatccgcatgtcgcaagaggaaggcctcggtgtggaggggcgcgtcgtcagcgtcctcgagggcggctacagtgaccgcgcgctgtcctccggtgtgctcagccacctgtcaggtttgagtgagaactcagagttcagaagtgagtggtggtctcagagtaatctgagagaattggatgccatcatggctccaacgcccagcaaagggcgcaagaagagtgctgccacctacctgacagccacgaaatcctttgcggcaaaggtcgttgtccctgggagagaccggaggtccaccggggacctcgatgccaacatccctgccgcccctttgccagaagtgagctgggcggtggccaccggggagctctcgaagctcatcatccccgatggccgccagacccggagctgccgcccggcagagctgaaccgccagcgccgagagcagagcgctcaggacaggggtctcgacctcatcatccccgtcgagaaggggcgccagttgcgcgcgcgcaagcccaaggagtcgggccccgtgcccaccaccccacggcgccaggcccgcaagggtctgaagacccccaaaaccgcggccgccgccacgaccctccctgctgcctcccgcgaggcctccccgtctgttggtgcctcccgtcggaagagcaccagtctgacgcgtgcgggaactccgcaccggggtgtcagccccctggatctccccccggttccacaggttccaacttccgtggggggagtcagggggcgcccccgcataattctcaacatgccggcgcaggagcccgctcgtggccgcaagttgtccggcggtgcggttgaccaccaccgccggggtcgaagctcaaagtcccccaagaaggggaagaagaagcgtgggagcaactccggcgagagttcggctgcttccgccggcagttctcccccagtcgcggccaaggatgccgtgatggagggtgcttaggggggatgatctttgtcttgtcttcttttttcaaatttgatacccagactgacttttgtcgaaacttccgtcatttgtgtaaactttgtagaccgtaacagtagatgacggtttcaaattctcgtctccttatgttcttcgacacggcgtacacaaaggaactggcttcgatccgcgtgaaggaagatcccttggatagcccaaatgctgagcgcgatcaacctgcatccaaccgccactagggtaagaaaagaattcgttgaggtacatacataagctactcgtgaagtaggaggcttttcaatatttgtatgctccttcatcgtacaatggtgtatacagcttatcccttgagtaactgataaaatgcacatctttcatcaaatgggcctgtggtttaggggtataatacccgcttcgcactacaacagtgacttgcggggggtcccgggttcaattcccggcgggtccattcttttttgtttttcttttttttttgtctaccttgcttcgtatattattcttttatccttcttggttatgttcggcttgttttcatgacatatatggttagtactgatcctgttatttgaattgtaacagtatacttgtatgttcttggttgatgttgggtgtcgtagtttgtatgcaaaatgtacatctatatatatttacctatgtatgccctaaaacaccacccgcagcctctggtttaactcgaagaatttcgaaaccaccctcgtctctgtcctcacctttctgtggccacaggatttgtcgtgtcaaaatagctcgaaccatcatatagcacacaaaaaagtacatcaacagcaacggtagtatcgccgcacacccaacaatttcaataggcttgcaggagaatgccttgccaatagcaaaagtggcagtgatcaaggcagtattagggaaaataaatgagaaccaggtcattgagaagaccatgcgtccatgtccaatcgccgaccaatgggccgtgcttgcaataatgaagaaaaagatggctaacctggagaagagttagccgagtacacagaaataaccaaacaatcaaacatacccccaaagccaaaggcacgcaaaattagtaacaatctttagcacatcggcggccagcgccccgtcacccataaaatcggccggaaacgacctcttcgccccagccgccatatttaccagcccggcagccgtaaacccgctcggtcccacagaaacaaacataccaggacggagattttcctttggtagcttctgcgtcatcagccggtatatgaaggccgagtacaccatcaatgaaatcaaaaagccaactccctggatagtcgtaccgccaataataaccggcaatgactgcgacggttctagctttgcactgaggatcccagcatgtgggccaatgatgagcatcgggtacgcagggaaaatccagataggagtcatctgcgcgatggtgaatgtctgcgtcgaccaaaggaggagatagatgcccgccgagaacataacggctagagtggcatcgatccagaagagaatacagactgcgtgaatcagccacggacctgtgttttcgggcccgtactgagatacgttgattaggatcgtgccaaaggatactatagctgcgggtacgaagagtgactccgttgggtgcatgaatgacgccttgaatgtatacggataatgatagaaccggaccagcagaagaccccagatgatgagatataaagcgatattgatcaggaaaaccacgatgccaatggtatccaagcccctgaaccgaaatggaactggttcttattagccatactcaaccgaacaggatgatatcgaccatgcacaccttgatacaagacattagctaggccaccagtagccatagtcaacgtaaaatacgcccacgtaatatgacgaatgcgctccttccagctcagctttccagaaaccgtgtgcttgagcccaaacaggctcagtccgttatactctcggcacgcaccggcttccttatccggatttgttttcacggtagcccgcgacgaggctcgctgtaatgcagcctccagagcagacgaatgagcctcgcaaaccctgccaccgggaatttcctcggcagtccccgggattgagagcgcccgctcagcatcttctatcgttggtgttcggtacccgtcttcgccgggacttcgcatgtgccggggtagatcgggttcggtggccatcactgttaactgcgggccgacccagcgagtgcacacggccgaatacaagcgtggatggtttgaacttccccctcgttcgggggttctattgtgctgcttgcggatgatggcatgggtagtagaggtgatgtcgcaaaaggctaagataccagcatggggaaaaaattatgtacgatctcaggtttctgttgtcgaagcccctttaattaatagcgattgaaaatctaagtagaaaagaatactagacgggtcgttgggatcgacgtgaattaatgtggagaccgatggcaagaatccacgactgctttcgatcggcaccatgaggttgctctgagagaggaacagaatagaccacaagctatgtggattctcgggaatatactcgagatggtgaattcaggttgttgcaggtagacaagtctacttcgcgattcgttaacgtgcaatctacgttattccattttttttttttttttttttttttttctcatttctcnnnnnnnnnnnnnnnnnnnnnnnnnnnnnnnnnnnnnnnnnnnnnnnnnnnnnnnnnnnnnnnnnnnnnnnnnnnnnnnnnnnnnnnnnnnnnnnnnnnnnnnnnnnnnnnnnnnnnnnnnnnnnnnnnnnnnnnnnnnnnnnnnnnnnnnnnnnnnnnnnnnnnnnnnnnnnnnnnnnnnnnnnnnnnnnnnnnnnnnnnncgttaacgggcaatctacgttattccttttttttttttttttttttctttctcatatctccaagctatttagtacggagtactataaagacaaaacaggcaatagggcttagggctcggtgctatccccctgaaccgtggaaccgtggagagccgaggcatttgcttgatctccactcgcctacctgatatgtatactagtacatgccgtagccagctgttttactacataccacgttgtataagtgactttcaaatatagtccttgggcttagtctgtcatacttcaactcaaacacgtcaggaatgacagacactcgcagatcggtgctcatcacggggtaagttgcagactttagacagataccaacaacaacttctgatatatgcagtagatgttctccaggtggcatcggcaacgctcttgcgcgcgagtttaatcgaaatggactacgcgtgctagccactgctcgcgaggcggcgactatttctgatctggcagacatcggcattgaaaccttgagtcttacagttgatgacccggagaacgtgaaatcttgtttcacagaggttgagaagagactcggagacaagggtcttgattatctcgttaacaacgcgtgagtacatgtggattttgtcattttatccgtgaacgatgaggtacatctggctaatctcccacagtggtcggagtatgtaaccccactctgcgactgctagagtcaaccatttataggtactgattgctgcagattataccgttcccgcgatggaagtagagcttgccgaggttcgccaaacgttcgagaccaaccttttcgcggtcattgctatgtgccaggctttcctgcccttgctcatcaaggcgaaaggtactattgtacagattggatccattgccggggtacgcttgaggtatatccatatccggagatctgatcgtactgacattgactagatcatcccatatgtattcggctctgtctacaactcctctaaagcagcactacactcgttcagtgacacgcttcgcgtggagctggagccattcgggttagataccacaagccccaagatctatgtcgtgttttctaaccaggatcaacagtgtccacgtcacaacgatcgtaaccggcggtgttcaatcgcgtattgcgcggaccgaccgatctctacggccgaattccttatattcccccatcgagaccgagtatattgcccgtgtgaagcatagccagcacaatgctatgccgaatgacgcctatgctcgcagtgttgtttctcaagtgttgtatggctcagctccatggcgctggttgtggccatgggctcgtggtcgtaaggcctggatctgggaggggcatgctagctggttgatttggatgttgtcgggtggctgggcttggtcgggactgtttggtcgggccatgactaaaatgttcaaactatggaagatcaaaaatgcctcggctaaatgaaggggggaggagagaggtgtagatgtagtcaataagatatagtagacaaacgcaaaagatataacgcatatagatcatacaagtaaataaacacccgtttacatccaagtaccgactttattagccatgttccgttatattcgcgtaccccatgctgagtcaggccaggaacgatcgctggttggccacggcacccgattctagcgtaacacaaggttacctaccccgagtgaaaaagaaagctgttctcccggtcctttaccatctaaacgggctttatatctccgcccttccacattttccctctcataattcatcatgtttaagcttgctcgcggtagacccgttgcggcggctttcaaggctgcaacagtgagttatatctgagatcgggcgctcgtttgatgtgttaattaagctgactttgttgaacaatagcaaccctccattcagagcagaatcgctttgcagaagcgaaacctttccatccacgagtaccgttccgcaagtctcctcaagactgtacgtccacctgcgtttcaccctttggtcgcctaagaaggaacccaggatcactgatcaacaatctagtacggtgtcggtgtccccaggggtgaggtcgccaacactcccgaagaggccgaggctattgccaagtctatcggtaagaataatataccactttcccccgttgaacgcgctcgctgaaaattacaatccaggtggtggtgatcttgttatcaaagcccaggttctcgccggtggccgtggtaagggccaattcgacaatggtctcaagggtggtgtccgtgtgatctactcgtgagtcgaacaaatctaaggacgggttgtcaacaatgaagctgataaatatctttacagtcccaccgaggccaagatgtttgctggtcaaatgatcggtcacaagctcgttaccaagcagactggcgctggcggccgtatctgtaactcggtctacatttgcgagcgcaagttcgcccgccgtgaattctacgttgctgtcctccttgaccgtactactcgtggccccgtcatcgtctcatcctcccagggtggtatggatatcgaagctgtcgccaaggagagccccgatgccatcacaagcacccccattgatatccacgtcggtgtgactgacgagatcgctcgcaccatcgccaccgatcttggtttctccgagcagtgcatcgaggatgcaaagaacactatccagaacctctacaagtgcttcatggaacgcgatgttacccagctcgagatcaaccctctgtctgagacttccgatcaccaggttttggccatggatgccaagcttggattcgacgacaatgccgagttccgtcagaaggaggttttctcgtggcgcgatgtttcccaggaggatgccgatgaggtcaaggccgctgagtacgttgccttacccagttatagcaaaaacaaaacggcgcgaaacaacattgactgactttcatctttttccaggcacggtcttaacttcatcaagctcgatggtgatatcggctgccttggtaagaatcctgttgatacgtcaaaatatcacaacgctaattctcgcttctagtcaacggtgccggtctcgctatggccaccatggatatcatcaagcttaacggcggtacccctgctaacttcctcgatgttggcggtggtgccacccccgctgccattaagagcgccttcgagctgatcaccagtgaccctaaagtgtctgccgtcttcgttaacatcttcggtggtatcgttcgctgcgacgccatcgcccaggggttgatcaacgtcgtgcaggagatgaacattaccacccccatcatcgcccgtttgcaaggtaccaacatggagaaggcccacgagctggtatgatgacagtccccattctcccttttttcgctatggagtcaactaaccacagcccctgctttctagatcaacgagtccggccttaagatcttctccatcgaggacctccagaacgccgctgagaaatccgtccagttctccaaggtcgtcaagatggcccgtgagatcgacgtcggtgttgagttcaccctcggcatctaaagggcgtttaaccttttgtttataatgatagagagggtagggagcattttcatttgcctttttcctgggcctagcgaaccgagccgaaccaccgcagtgacatcttagagtgatctttgtaatgcttttgcgcctgttcctgtgtcatttattttcttgttgtcactgtattcttgagtgtttctatgacttagatcagttcctaatcgggatatgtgagagatgatatattgagctctcattgtttagtgtaaagtatccctttctataaagttcatctatgtagggtagatggctgcttgtccgagtgaggatgacctggactcggccatatattcttcgagcttctttgaaggcttgacagaagctacgtggggaatgataacattctataatgtctccatgatggggcttaaaaaaagaaaaaggctgcgagagcctcccgtactgaagtccacgggtcgcccaccaccttacttcaacctcatctcaaaccgtcccccccttccatcccatcccatccaacaatatccctttgaaagtttctttctttctctcaatctttcgttcgcctcgatctaacatggcctcacccacccattccattctcgagggctttgttgctctccgagacaggtcaagccgccgagaagtgtatgtcccacgtccaaagcccatagtcggatctgactgctgataaaaataggctcaatgcgattcttgataccctagattcatatgaaatacgagaggtgaaaagtcgactcgagccggtgacattccaacttgatttgctaggtaagctgcctattgaactggtggctatgttggtagagtacttggacctagcagatcttgttatccttcaaagagtatgtcagcatctgttcggatattcgtgaccaacatgttgacatttcaaaggtctccaaacgatggcgtgaattgctctcttcaaccatcgtcttcaccactgcagtcagacaccacatgggagaaaacatcatcaagtccggttctacccctatcggttttggcgcgctggtaaaaaaaagaattcgcgcggaaaggggaattcctgctgttgtggccacaattcctaataacttgtgttgcaatgtagcgaacatcatggagagagaggccctaagctgttttaatggagtatgcgcgtggattgaaaaatccacagatcaaactactatattcatggtgaacctatcaaccggcaagaacagaatcctcacaacagcgaatcgagagagatttatttatgtccaggtctcggacaccttagtctcagcaatttctgttcgggggtatgtagccagaacaggaatttcactttgctgaatgcacctctgactggacacgataggtattgtcatgtctggaacatatccgaagaacagtacaagtcatttcgcattccttcgctgaaatttggtcattacatctccatcggatccaaggtcatgctgggctactcggattccgtggtccacttctgttttgactctggaatcgcccgttccatcaaaatcgggccgttcgttcttttgttgtcagtacatccggaggaagacggattctccgttgtttgcgtccgcagaaaaaatggcgacaatactcaagcatgggcagatggccacttgtattgggaagagcatcatttgcagactcagaagttctctgtccatgataataggtttatctgcacgtgggagcaatatcgagagcttcctttcagacaagacgaactgtggatgtttcgatgcaaaccagaagatagctggccaccatggagagtgtgcccgcgccctggtcaaagctctactttgctggattacgatatgaccgaagcctttatggatcgttctcctaattatctagaacacgaggatgaatatggctcgctttcgctttcactcgaggcggatgatcggattactgtgcatttccgctgcgaaaatattcaagagctggaattcaattattcttacactaatctagactatgcagcccggggcccggggttgatttattgtttagacatgatgttaggggatttgaaaattggctgtgaatttccagagctgtggcatgcccgcgatgctgaagcgtattcatccttatcctttcgcagaataccttttgcagctaaccaggcacccaccgcgatttggggggatggagactttgctctattccttgtggatgacaaaatctggatctggtgttttgatgaggcatggatcccttctggcatccctaacatgaagattgaatttcgcgatttgactacgcgtacaagaaacaagaaatgactataccaactagtcagctataacccctgtcaaatccacctgggcgctagcggatgattgcagtcaatacaagctctttgttaagcaatactgtatgaataaatatgtagataccccgatgatgattagaccagggccttatatgcatgtgagtttaaaaaaggcagattgtatcacagaaaagtgtatcattattagggggtaatttgagatataataatagtacaatagtacggagcactatggaggtagaactacggagtatgtctagccagtttagctgtagtcaggcatgaaccctttatcatcaccgaatcccagttaaatgcctcaaagcctctttatcctttgatatactccgtatagcgtgttatattagtgagaattaggtagaatccaggccaatagggctataaaagatatggagtagaggttagacaattaaagtaatagccctgtcacccctttttcccagataatatgctaatatatccaattggactctttcttttccttcatccctgtttaaactcataacttcctcattttttctgcagaccggactgtcaacgcatttccggcccccttccccgcagagccttttcctcaaccttccagacaacttcgagactttcttttttttttccctcaatattttttgttgaaaacaacccaatttctgcgcgatgacagaagtgttgattattggttgatctcccacgttcgttcggcacgagcataaacggtccatcgcgtccgaattccacccctcacgatcccgtcgcatccaccatcgatcttgtgctatatatacccacacccctccgacatgagtcgtcttgccgaccccccttctactaggatttcatttgccggggtatcagacgcccccggcaggacacgaaacatacctgtactttcgtcgtctggtcagcattcgatggatatcacccctccgtccacgggcgcgcatggctctgacgaccgaatgaccggaatcaccaatggcgctgaagctggaaacaatcttttgactgctccaaatgcggctatcggcgctgcggccgcagctcagcagccaaaagtcgtccagactgctttcattcacaagctctacaagtatgccttttggtcttcctgagtcttttgtcttcatcggcttacctttttgggaaacagtatgctagaagaccccagcatccagcatctcatctcttggtccggtacaaatgatagcttcgtcatgtcgccaacgtcggaattctccaaagtcttagcgtgcgtgctatcctctctgccaatgaactcgtctctgaccctcgcagatcatacttcaagcataccaatatctcctcgttcgttcggcagctgaatatgtatgggtttcacaaaggtgggtgtttcgcatgcgagctttgactgggcgatttctgaccatttttgactctgctagtgagcgacgtctttcacaccgggtccccggattctgcgctctgggaatttaaacatggcaatgggaacttcaaaagaggcgatctagctggtctacgagagatcaagcgccgtgcttcgagacacgctttgatccaccgtgattcattccctggccacaaggctcctgtttcgcagcccggaactcccgccgaacccgtacatgatgcgaccgaagctagatttctaaatatcgagcaaaccttctacgatctgcgtaatcgtatggctcgggccgaagaaggcaatatcacactgaactcgagatgtcatgctatgaccgaaagcctgacaaagtgctaccaggtatgtccgccgtctatgttattgcagggtctagtgctaacctgattttagtggacacattctatttcacggtttcttcaagctgttgtgcccgatagggaaagccctctacatcgcgatggtatgtcaatattgccgcttccctcatggtgacacccactgacactcgccagtctcgagcatgcaaagagaagttgagaaacatatcgaaatcatgcgcgccatggaaaccccccacgagaccctcatgcctccgcggcaacagtacttcgccaacatgactgaagccggtccacctttgtccccgcgccaaatgccccaggacgatgcccgtcgacagtccatgatggaccatacacctagacacaccaacatgatccgaccgcccgtccctccccatctctcagtatccccccgccgctacggctcgattggcggcgccaattctgcctcagcatacgctcgcctacaacctcctgttgcgccgcccgcacagcaaccgatgcctcatcctctctccgtatcaacgtccccaggaccaaacttgacccgccgtcacacgtctgcggatatccgacagcacggctggtccccctcggctggctcaccctacccccctggcaaccccccaaacggcccttggccttcatcaccagggcaccgaaccccggtctctagtgaccagcaagtccgtgatgtcctcgcccaatacgaaatgggcgccccccgccgccttcgagaacaatcccgccatgccactccaccaactgccgaaccttcaccgtccatgctcggtgtcgataacggctggacacttggtggttcaagattccctcacggctcttccttgcccgcaacccgtcgctcgagcatggcgagcaatgtgcattcattgctcaatcctgcagatactgccgaaagacccgacgaggaccagcaggcgatgtcagaggaccgtaagcggaagcggttggaatgaatcctacgtttttggaagattcccagcatccaccattcactaatgctggcactaccttcttctccaatcaagtccccataccaccgacaagccatgccactcccctcttcttcccctgctcttttgatctgcatatgtactattcaccagagcaaaagggcacccatttccaggcatctggagaatgtccccagctctgacctcatttttttaattccgcctgtagatgtcccatttcccccatttcttctccacctttcatcttttctatttttggatatttaattctggcgaaggcacgccaatcccggcccttggcctaacggcctacggctctccgggtctccatacttcgttcacacacagcatatcatatatacccttgggttgggcggagcaaaaaaaacatttgaatcttgtggcacctagagcaagagactggaattgaattgtattttatatttgcagtttgattatatcaattagaatgatgttttttttctgcactgtttgatcttgctattttgttggagtggcacgtggcacagcatggcacagcatggcactcagccgagtatgtatgcagtcttccttggtcgtgtctagccaagggacactgcgctgtagtctctgccgctggcagagtgaggcctcagcgggcgatccggctgtggcggcatgggttcaaccccaagcccctgaatcaacggcccaatcgccgtgtctggcgcatccgaagcgacgaagatcaaagcctaatccatcaaagaggacccagagccaggtacggagtagagctcgcgcaaagctcgtgtgcgtggtaacatagaatcgaaccgatcaaccgcaaatcttcatctcttcttcctcttcttcgcacgctcagccaaaagctcatcaagataactcgtagccttcttcctccccttcgagcgcgcaggagcaggcacaacctcaccctcaccctcctcgccacctttatctctggcctcagcagccgcagccgcaggatgcacaccacgacctgctccagccccacctttcctcttattcttctgcctagcaagcatagccgagcgaccgtcctcttcatcatactcgtcctcgacgtcggctttcgacacactagccgaagcagacgcagccgcggccgtagaagcagcattcgccgccttctgctcggcagcggccttcataacgcgatcgtagttcttgccgaggagttgtttacgtagtttatcgtttgagtccagctctgtgcgattccagcttccgtctgctgctttttgtgggaggggggctccgacaccgaggctgtgagttcgttgtggttagttcgtgcattgtagggtatatttggtggaattggagaatggtggtaaggtatatgcctagattgtaggtggagaggtggaggagcactcacgtctctggcactgcagtgaagatttcatcttcttctcgttggagctcttcgtcggtcttggggtttgctagctcttctggtgtctgttgcggtagccatgaggctacgagccgttgactgcgcgatagagcaatattggcccggttaaggatcacatcagactcgcttttagagagcgacatattggtttctttgcgctcaatgtcgggttattggcggattcgaatcggtcttttgtggttgggatctgcgatgcctttttttctgccgatatagcggtggcggtgagcatgatctatagactgacctgcatatgtaagtaactatacgtaccggattctccctggcgtgtggagctttcctatttgatctgccgccactttcatgagggtgctcagactcaggctcactgagtagatgtcaccacggactcagatcagtgatcatgcttagttcagtcacgtgtagaatgactgttgcagcctaccgcagactatacccagaagggattagcccccacagggtcgtttatactgtgatagttagttcgttgatagcattgctactgccctcaatttgtgaaatgctaccgacacgcgaaaatcgctaccgtcacgttgcccgccatactactttaggtaagtctgccatctctttatcttccgcttaagtcggcttctcgggagaaacgacatgacttcggggagcatgccactgagtctcagggagaaagaagaaaactgataacattccaacgacggtaaatggcagatgaatgatgaacaaatatctccagccaaggctctcggctattacgccacccaggatcgagactagagatataatgcaggtccatgtcatcactaacagaccagtccggagagatcgctggtgaacgaaacaccttttattctcccagtcagcgttgtaagacgtaggcaggaggttaaattgacacacatatctcccatgactgcaacagtaaaactcccaaagaccgcggagctaaacccttggataattcgccctgctaatataacattgtagttatcgctggttgtgcaacatacaagggttccaatgaatcccatgatggtagcgaagataaattgtggccgtttgccgtatttatgtgccagagcagatccaattggtctaatcatatattagctcaacgcccgtatcaagacatatatgagacatacccgtaacaagcacacgcaagcaattgatatgcggtaagcattgtgatatcttcaatagatcgctgcacagcgtgcgacatcaagaccatagatggagcaatcaggggcggcggaatggaagagaaaataatcgaattggcgaataagacacaatatatcaaattcttcctccatcgtggctaattctatgcggggtttgagattcctcgctccattacatcacagggtaccacctaccagaggatcgtttgggctgttggagggctggggaattaagacaacgcttgcatgctactcttaggatattttcttcgttttgccggttatcccttctgtaattacctttccagtgccaaactttgtctgggaggagacatgtgtggatgattcatcgaatagtagaaacgttccaggtgcatggcgctcattcagttgaatgatacccaaagccattttgtatgatatccgatagagaggctcaagttatatttgatgtaaaggtttgattcacagattagaagattagaacctttttttcgcccctgcctctctcaggggacgctcttttatatcctcacgcccccatcaaagttttcctggggaaactatggcggggaacttcggcgtctgcccagatattgagcttgaatttatctcatattactagtaccaaaacagatcatgaaccactgtcagtcaaagtcggatctatacaccacataaggttaatgccaagcacacgaggaaatagtcgagacccactatataacttcacctcccgcgaagccctggactttcctattcaggtagtgcgaataacctggggattgtgacttgttgtcaccattgtgccggagataggcatacctcgcagatattcaaggtgttaccttgggacaaaacaacaaccggtgccctccagggctgcctacctaggtacccgtggacgaatggagacctcactaaccgggatggaccctgtaggagtagatcagcgccggagtgttgtgaagggatattgatcaagttgactccggtccggttggttgataaaagttgggtgttgcatccaaaacatttgtgggcttaacaggttggagctggagaaatttggaaggttatccatggatgttattgttccacgattaacacctgttaacacccaagacattaggcaataatccgtaatacttctttatcacctccacgcccttcttttctctctgctaagcacttgaatttaacaacccgcttgtttatcaacttcaccagagcgttttcatttcttctgaatcttgaagctactcaacctttcgtctcctttcccttgtcgaaatgtctcgctctaggggcttcgtcgtaacgatcccctcgataaacttcgatcacctgggcggcactgaaatcaaactcgaccagccttccctctcgccccctcgtacgttcgttattggcgagaaaatatccgaagattaccaaacgatgacccaggaggaatatgagcgacaaccggggcctccgtttgccgtcattaagttctcttgtcacagccttctagaccctactcagcagggcttcatgcggatctatatgcagatccctcttgatggtaccctttctagcgttccagaagtccgagcccagcaggctgtaagccagtgcacccacacggagcttaaagcgcttgtatctcttgatcgcgaaaactgcatggcagtaccgaaattgcttggctatggggaagggttgcaaggtgtcgaagaatttgtacctggtggttacatcaactacgttgcgtgggaacgggtgcctggtgagcccgttgactactatactttctggaaacgcgactttgaataccgccagtgactacgttccgcctttcgtactgcctatgagtaagatcataacccctacatgtccaaaacttcgagaactatctatactaatacaacgaagagaactcagtaggtgttcttggcaacctggacttacccctccgagcaagattatctacgatgatgtgaccaaggttatgtaggtagttccgacattctattcaactaaccaatctatgaatgccgatggtgatgagttaatcacttttaggcacatttccggattccgaggagcctatccaatggacactgagccgttctaagacgagacctacgtgttatggggattggaaaagccatctgacaggctggattggtatactgatagctcggactggacctggtgaccaatgtggatctccgtacatcgcttctttgacagtcgaatggcctttcgcatatgggattgtattcttgagttgttcatgatacccagctaccctagtatgcatgtatctgtcgctgaactagtgctttcaataagacaattgtagtgcctttccgctaaagatagcccttgatactatgggagacttacaacaccttagaatcattcagcataaatgatcagatgaaatttccgaagctactctttgacactctttgacaacgtaatatcgtcgtcctgtaactcgcaagttgcaagtttccctcagaaatccaatctgatatcagtattcaacatgggtccttcatgcataatgccccgacaaagctgtagcctcgatgctatcagcttcattaggaataaaatctcggctttagtttaatcatcagctttggcttgttccatagcacataacattcttgatccacccagtccttttcaggctggtccaattccatatcgaagttgaagaccatgcgagcaagaatgatacgcatttcgacatatgccagactagacatatatatgagcaaaaagcgaatacagtagagacactaaaaacttacttgcgtccaatgcagttcctaggaccgaaactgaacggttgcattgcaattttactgtcattcgagaaacgagggtcgtccaaatgccgctctgggataaactgctctgcatcggcaaagttggcaggggagtgactggcagcgagatgggagacggaaacaacggtctataaaaggcgtaagaggtgctgtatgctgtatggctttttaagcaagctttgtacttaccccgcctggaacccagttcccagcaatcatatcaccctgggcatcaacaatacgaggtaatccaactgcaacgggtggatacactcgaagagtctcagtgaggacggccacacaatactctagtttattgcaggattccaaggtgatgtcttcttcttttgcaaatgttgatctgatctcatcttgaagctttgccagaacgcgtggatttctcagcagcagatacgtcaccccagagagcacagttgcagtggtctcggagccggcgatgatcaacgtactgccattggtgatcatttctgggatgctgaatcctttctcggtatttcgatacctcaaaatgttgccaaagaaatcaggtctctcattagacttggctatgcgactctggactttttcctcggtcaaggctaggtgtgtattcctctgcgagaggacatacttaggagtgatgtatgggaggatgtatttcgatcccgggaagcgtcgagacacatttgcgtaggcaccatacttgagcgaactgaagataatggatacccattggtggtaatccgaattcttgagacagtcgaaaggctcaccgaaagccaggtctccaataatatcaaaggttgtgaagttataccaggccaccatgtccacggtatttgtgccactatcgatattctcatgcaagcgctgcatcaaaagatcaacatagcctttaattataggttcctggccgcgcagtgagctatcggagaatgcgtgcgacaatagacgtcgaaagcgggaatggtcggcgtcattggagatgatgatactgggagcttctccagcggttggtgcatagaatcgatcatctttagacttctgaccatggccaacacgtgtgccatagattgacttccaggccgcgccgtctatgaaagaaagttcatcgggggcaatgcgaactacatcgccgtactgttgatgcaatgctttcatcttttgtgggaaccggccacctaggatcatgcgaatataaggcagacgtgtagctgccatagatttaggtccaggatatttggacaaagggtggaagtagacattataggccaggagaccgatgaggtaaagtgggatctatttagaagtaagcccttagttagccgaattccatcgaaacaacctgaaagaccagcgtatacttaccaacgtcaggcttagcttcagcaaagcgggagctatatttgagaagtcttgcatgtttaaaagtgccgaaagaccaggaataaccgctatgattagggctgtcaagcataagattcgagaatattcacaacatccacgacatttcgagagtacttatactcctcctttcctccttgccactctcacatgtgtgacataaaaacttaatgcacaaaatctctgcattatgatgatctatgaactgagaccccgcactctgcatagcacgattctagcccaacaagaggcctgggaatatgtacatggcccagcttggtttcaatctaaatagatattaggagagacttgttgtcctttgaatccgagaatctcttcccacccatcccttataaataaattaggactgggtattcacctagatgctttcaacacacagtccagacattttgaataaggatcgaatgttgaagtctcatataatagacacaccgtcattggagaagctagtgttccaagctaatgtagccaagctcatgaaaaccttccctgggttggtcgcggcccatgaataaatcttgatgtaatgcccatacaaagggtacaaaatccgtgacatccatttcactcagcccataaataagactaatatgtaatttaagcacagttaggtcgttctatcactaatgtattctaagcaaccttgaaattagtatcgaagtgcgagaggcaccttaaaaataccatatatagagattgcatagcacctcaaagtagtatgcttaatacttatcaatattgataccaaaatacacaaagtctatttgcatatgtatacaagagctatattttttatgaatctcttatcctttgtatgagcatgacataaaagatttatgcttgtactagcaatccatgtatgtatcttttttatgccgagagtaaatataattctgcgcaggaaatgcagcataaaggccgtgtttactgggcaatccgaagagccacagactacgatatccacattgaacaataggctatgttaatcggagaccttctcaaatggccaaatttactctgagaaagctgggctaaccagagaccaaaagtcttgttactatcatgataattacaaatatgtgtgtatgcgttgtagtacatgtcgtcgctatgtgtgccctctgcatccatgtggcaatccatacattttcagtgggagacaatcatttgcacggaggacatcttgcagcatttctaaatcggtttgaggaaacatttgcgagccccaagaaatgaattatattcctctgtggagtcgaagcttgtccttccctggtgaggaagcatcttaaaaaggcagtgagaaaggcctgcaggaattccaaggttagcttatgaattgaatactcgaaataatataatggcctcattcaagactctgtgtgttttgaatcaagtccttagaatcttcattttctgtgcttttagttggattttgactcacgaatccaagataatgccatcctcctgtttcagctgaccatggtttcatatcaggtaataactgactgtcattaagtatgatgtgggtgaattgctctaagctggggggtccatttaacaaaattctcagtaaagcctgttcacagcaatacatgatatttccattaggagaaggaggagtgtacaggcgcagaacgcaaaaagtagtatgatccgagtctttcatgagctacttgtcgtgatgacattttactgaacacagagcccgacaagacactctggtagaagcatcaatcgcattctccaagataattcgaggaacctgtgcggtattaccggcgtcacactctccatcaataatgaatgctgcaggtattgctgttaatgataccgaaatttgcttggtgaaacgtctcacgggcaattcaagtttttccctttcgaattatcaaaatactaatgatcctcagggtcatataaggattacactaattatatcaatgtctatactacaatagtctgaataatctcttcaacaaggtataaaaacgttatggcatcatttatgtacagtctatctctatacctgatactgtgtctgatctagacacagatccccattttgttccaatgtagtatgacacggggtataaaaaaccgagaagcaaccaaaatcagccgcaagggctcacactgtagctagaccctcatgttgacgtttcacccgcaaccttttctcggttttcatgaactcccgaataccaacagggatattggaaaacaggtcatcgtgttcagacggcagtgtccagtttgtttcgctgccaccgccatcatcatccatgcttccactggctgcgcggacttccgcccgaggtgcccagcgcatgtcccgtgttcctttctcaggcccacctttagctttagccattgtgatcctggatgcccagtcttccatctcatcccggaagtcatcccagacacagtgaacgcagccactcatgcagcagttgtccggttcctcgggttggggaggaatggggactccgtttatagttttccacattgactctggaggagcttcaccaggattgtagcgcgaggttcggcctggaccggtgagagggctgccaaaaacgatcgccattctttcttggggcgattgcggtgcgacagtagatgccggcgtcggtttggcctcgggccgagtgggtgtcgggcgtgatgtcggtgcaccaccagcgtatggcgagttcgatttcaatatcaatgaatagtatcctgacagagggtaggcctgaagaggctctgcagtttcctctagggaagctggggtattgggttggtcggattggctgtgtccgttcatgcgccggggagtcggaaccagcacatattgtcgatatgaagcgaatgaaggatccgttccaacagggaaagagcggatttgagacacggagctccgcagccagtgtcttgtacccgtcaagagacactccatagtgtgagttggagaaagacaagaatgttcgtgcattgacgaagggaaattaggtcataatgcaaacactgcaaacaattcacgattgtttatctttctgaggtcatcatctgggccagacgaacaccccacgcagcaatggattccttagcaaaaaagcgaaaaaccaacgagactacaggcattcctgtagcgccagagattcctcaaaatgaagcccatcggtcgagacggccctccttccagtctccaacgagggccagtcttgcacgatcacatcccgatttattagagcgcgcaattagcagatctcctgtccgacgaccagcaagcagagacagtgggcaacaagatcctcgaaaatttggattacgcgatcgcaaagcactccgaccttcgctcaatgcctccgcaagtcccctcactcgacctcgaggctctgaagcgcccgaaagttcccccagcaggcgctcaagtggcgttcaagcgttctcaaaacccccgcgcaggatttcaaggaggattttcccaggagatttagtatttggatccccaatgccacagccaaagaatcccgaatcaaatacccccgagcgtcaattggcattggaattgggtagcgccacaagagaagcatatatggatatggatccggactccggtttcatggatgaagatatcctcgaacccgatcttccccccacgcccacacaattaggtctagaaaaggccccagatcgacccaggggaatgttgagtagcagccccagtaggcgacaggagaaacgagcgaaacgaagaactatcaatgctttgtacgaaagcccacttaaggcagtgaacttccaatcccctccgctggaggacctggagacagcttcagacttgggtgaagtttcagcagctgttcgcgagaaacgcaattcgcgcgagaagagcgctgcagatctgcgacggctgagaagcgaagttgaaaaactggaacaatgggcacacaaaatcgagtctaatcctgactcggacggcgacacgagaggactcgacgaatttctgtaggttccacaagcaaactcggcttggatactgctgacaatctctaggtctttactcacatccgaagaggcgaatcgtacaagtctcccagtaccaaaaacagcccctaaatcggtatcatccctcctcgccactctactcccgttctccgccaatatccctcgcccaaaacggaaattatcatcgctgccgacgaatccatttgccctgcaagaagcctctcaatcactgccatacctaacagccttcgcgcccttgaccctcaaaacccgtacaactcggtcatcacgtagggaggagctgttcgaaacacacacactgaccttttctcctccatctccgttcccagcaagtctatatcatgtgactgttgtctatgagacgaacctcgagacccagtctttgatttctctgtcagtgcctgctggcagtgacagcaagaaaagaaaagtccccgaagctctccgtcgatggatcaatactcgcttagagaaccctcttttgaaacttgacgtggcaactctatgctggggaataaaccgttactgggaatctgcaattactcgcgctcgtttgtgggcacacattgaccatgagtatggccctcgggtctctcagggtagaaaggatactgcctcggaaagcaagaacggcctcatcagactttctgaactgcgacgactggtcccgcatttagatcggagcgcgatggtcatcagccctaaatcccctgactccagtctccgagtgcttttgtcaaatactttggtgttggatgaatggaccggagagcctcagctgcggcctgagattagcgtgtcgatccccggggtagataagaagatcgatcaggaggccaagaagcttttccatgcgttgctacgtgaggatggcgctttggtcacgcgaggtatcgagggtggtatacatgttgatgcggtggtaagggcgactgaaggtgctcttggtgctttgttcggtggtctttgatttttttttggtattccggtgcgattgtcagcgtcaggtgttggagtgatctcaagatacccgagcagagctcacgtgttcctctaaagtatgagataatgaattttctgtcttataaacgagctgaattagctatgtaatcagtcactgattgtattgcggcacgttcatagatgcagtaattgattgacatgctataattcccatccgaataggcatctaggaaacttaaatcgatatcgaagctacaaagtatatagtgaaatcaactacaagggttcaatgttcttctcgccggaagctcaagatacaacgcctagacaaccacaaaattatgagatgtacaggcacaaagccgagattgagagaattgggcagttttgaatttcgagagatcttccgagttctttcttttagagacaaaaaggagtaaaagttggggagggagagagggaatcaaggaagaggcgtaacgccatgccacagtacactaatccccgattcgaaaaccgacccgatcatcatcatcagcacgaggagggaattaacacatttatttcttggcattggcctcatcatcagccttggtcttggcacgcttctcgcgcatacccttgtagcgggcctcagcgcgggcgtcacggagacgacggtaggcagcctcctcgcccttggggagggagtcgcgcttgacctcggtaacggcctcagcagcggtggggttggtgatggggaaggtggcctcaacacgggtggcgatgccgtcacgcttgccctcagcgacggtggccttgacggccttgacgtcctcagcggaggagtcaagcttcttgaactgaccgctcttgcgggggaagaggatcaggcgagccttgtagtcctggagacgggcgacattggcaaccagagactccttagagtagttggtgcggcggtggtcaacggagataccgacggtgggagcaagcttcttggggataccagcttcctataaagcgcaaaaagaaacatgagtcagcaagttgtttctccgtaacacctccactttcgacgcggctcattttaccttcagctcagcgagggtgaaaccacgaccggcacggacacggcggttgtacttgatggtggggcatcggacaacgggacgcagcttgtcgaccggacggggagcaacagcagccgccttagcgatgcgggcctcacgacgacggtgcttccggccgggctgtgcgattcatgttagtcggccaaattcatatcctgcaaagagaaaaatttcctcgattccaagtcgcttgcgatatcgttcggaataagagaattctctggtcggggggagggatgttggatagtcgtacctggtcgaagtgcacacggacacgacgctgccagtccttgtggaagtctattcaagaattcgttaatcactgttccttcaacgtctggtctccccaagcctctctgtccgtttgaagcgacacatagagttgcaaaagcgacgggtcactcacggttcttctgaatctggttgttgtgcttgatcgcctatatatcccacacacaatcggtcagtcaaccatttctttcgttcttttcgaggcgtatttcaatccatcgatttctctcaatcgcacaagtcgaatccttcattgtatctctcaagcagggatagggaacgcaccatggtgacggatggggatcgagccgggtggtggtcgtcgagggttgctggtcaaatcctcttcacggcagaaaatgaagttcccatttttcgtgtggccgcccgctgactggcacaccgcctcgcttagcgagccctaaccaagccgaattcggtaatctgccagagctattttttattttttatttttcatttctatgcttgtctgcgacgatatcaagcatggaattattcaatgagatcatgcttgaacttcagtatattgtttcaatgttgtaattcgattttggtctctgaagactctatacctattgtacaatggttgtaccgtcccaaattcatatccccaaattcccgtctatagctaccctaagccataattcccataccgaaaagacaattgaataacgccacatgtgaagggccatggatcactgtcgcatggccacccaaattcccccccccccccccaaaaaaaaaaaaaaaaaaacagttcgctacttggaaacaccatatttggcatgtcttcatcattcgtgaggttcccataatcgtaacaagcaaagcaacgctaggtcatgaatcatatcaaagtcagtggcacgagttcttcaagtagccacgggatatggactcaagcattgatgcccaggccaataccattcgtagtcctggacttcttcgtggcagcaacgttcgcgtcactgcctgccttgcgcttgccagcacgagatcgatccacaccaggtttctgtacctgtccaaacaactttgtctggagcagtgtgctgctcttggggacagtggagcgcatgtgctgcggggaggtccgagcttcctctgcagcctcggaggctgaaagggatacggtgctgtcgctatcatagtgatcctctcttgggtgcccagctggagtgatgtactggttcttcgagtggttcggggtgacggggacagaggttgcagagtgactaccataagcgtgcgtctggttggtgagtttatcggcatagagaagagcggcgagaccatctgcgtgttcaccatgacagagattgtgtatatcattctgagtgcccggtgacatgctgccgtagttgaagatctgagaaaagtgcttgcgattgtcaccaatgcggcgcttcagcataaggttctgctcctcgaggtctatagaccgactggtagcttcatcaatggcacgcttcgcttttcgaagtcttcggtctagaacggtattgagttcttctaattcctgcgagcgttgaacagccgaaagataatcaaagtttaaggcagactgggactggttgggcgtaatgggatctgcagggtgcgagcgactgcggtactcggcgctctgaataatttcgacttcgcgcttggcgagctgatgctccacctcggcacgcttgacagcttcattgcttgcgaaagagaccaagctgttctgcagtttgaagtgcagcgcagacatgcgcgactctcgggctacggttaaaagttccttggcaatagtgcgcagttgtgtttcgctggcgttgtcgatatcctccatggtgggcaggttctcagaggccccgtaggcatcgcacaacgacttatccagatcagtgggcttcaccaacaaagggctcaaggagcgcgagtgtgagcgagaacgaagcggggcccctgggatctgagatgagggtggaggggtcatatcggatgacgacaatggtggaggtgagaggaacttcttatccgactgggacgatgggcgcttagccatgacgctgagctccggcgatggggacaaagtggcccggtgggctggagtcgagggcacgatctccgcaggtgcacccagggaactttgggagttgaagttttgagacatgatggacgtgtggttataagtgagctgacacaatagtatatcacttcgataagaccacgagggtttagccgtggggagacgggtcctcacactaatttcttatcagcctctttatcgtagaacagatcatggacgaacaaaggaattatctacataccgaagacagataactatcagtcaggacttgggttcggtcgatcacacagatgctcagaccaggtatgttgtctcaggaaccaacagaagatgggggatctgggggtggagcaaggggaatttcaatttcgagctaagacgacaatgactcagagaacttgaagaagaatgaaagaagggagaataatggagttgagtgagaccttaagaggaagaggttaactccagcgttattgggaggggctgggaggctgggaacgggagagtctcaaggtacccgctttgggttagtccatctcccagccccgatcaattatctaagaatataggccaatcagaggtgagtatacagttcggccaagcctatttaggttagattggcgatcacgggacgctcagggcaagtaaacacccgcgaccgggcaagcgctgggggttgggtaggcaaccgataagcatcaagatctgtacggagtatatgtatatatgatatcatggagatgttttgatcttgatgctttgtctatcggaggcttgagatgttctgggagaaatttcgggttcttgcataacattagaagataaaacaacccaagtattacaactcttcgaaccgatgaaacttgagattgcatataacaatcaattacaccgtagctagttagaagaaagcaccatgttatgtcagagaaatcagacaagaagacgcaagggcatctcttagcagttggtaccagctcttcggtggcaaaagtaagggtctggtctttgtaatctctactaatatctgctaccaaatgaatattgagtatcggaagagcattatgcccaaaatataattgtttaagcatgaagttgcgctggagaactatttgtttgtaggtgacagctctttgatatatatccgacaccataggccacgggtcaaataaccgccaaattacaatgaatccatggtattccatacttgaagaatagatctggatatgattgtagcaatgcatgacttagaatgatgcatatttgttttatatctgcttagtaccaaatatttcatggatcgggactaaatcggtcgatgcctgaggcgacgatcgcgggattgtgagaccttagaaatgtaaacaatccgcttcgtccgaaaggtttctaaacctctagttctttattcctttgcgtccaagacaacgattttgataggactgaaactgctactgcgacttttccccaccctccacattctttctcccgcttcttatcgtcgggcacgagcgtccgaatttctaaacgtgcgactctctccctgaccaaggaccatcatcaatagctagaacgccaatatggaaggacagtctaaagcatcaacacgccctgcgagtggtataccacgtcctgcaagtggtattccacgacttacttcaagattgcctttacccacgacaactgcatcaaaatcgatcaaaccgtcaccttcccgagacagactacgagcggatcccggcctggacgaaaaaagattgcgaagaccatcttacaatacactcgtgaaaaaaccgtcctcgcaccatttgtcacctcccaagccgcaggtcgatccaaccccggccctcaagcaagaccatacccaaggcggggaagacgatgcacatgttccagaggagacaagctcgattgctggggatgatgacattgtttcaatcgaatcggcccaagaaacacgcggtcgccgtggagtacgcccatcgttgtccgagcgtacacttgaaacgctagcgcaaattccaccatcaccagcttctgtgggaaggcagtctagctttttcaatggtagtagcccggtacgatctcgatctcgtgccccgtccaatgtgtccaatgtctcgagatcgccatcgggggcctcattttgcgcgccgcccagcaacgagctatatatacagcctgtttcgaagctgcgttttccctcgaaggctcctgcgtcgactgctggatctctttctccagtccgcggcttggaggacagtgtgagcccctcaagattgaagcgcccgtcacccagacaaggtattgcaccgggagacagtatccagacggacgtcagttcaccgcttaagagggaaagaccgattgggaacagggatgcaccaaaaccctcgcttgtccgtccatcatccagcaaatcctccacaaagcctgctaagtcagacatgggtcctccagaaagacccctgcaagtgaagaaaacgagaaaaccaaaaacagagcaggtgtcgaccttacgctcttcctcgacggcttccagatatgtgtctgcttcttccaacatgcctgatgacttgtctccagagcaagaggcagaacttgaagctagaaaagtctctaaatcgtccagtacgctgcgtgaaactatagcaaaggcaaaggcagctcgcaaagcgatggcggcaggagaaaaaaaggaaagcccaaaaaagccagtctatcaggctccgcctatcgatgcgcctatcgattcctgggtgggcggcgacgatgatgatcctttcagccaactgcccaaggggtctaactctttggtgatccgaaagcgcgtacagacagcgcgcgcgaccggccagttgaacatcgcggcgttttgtttaaaagagattccaaatgaagtgctgacgatgtacgactacgacccagataactctgcgaactggttcgaaaatgttgatcttgtcaaatttaatgccgcggacaatgagctggaacagatctcagatgccaccttccctgatatcaaccccgaggagtttgatcccgatagcgatgatcgaggacttcaatttgggggcctcgaagcattggacctccatggcaatatactcaaatcactcccgattggtctccgacgtctgcaaaacttacgcactctcaacctgtcaaataattctttgaccatggccaatatcgagacaatcgcagagataaagtctctgacagatttaaaacttgcgaacaatgaattgcaaggggaactaagtgcggtcattggtcgtcttcctaacttggagtttttggatctgcgtggcaatactctcactaagctcccaaaagagcttgttgggttgagttctctgagaacattggacgtcagcgagaacaaattcacttccttgccgttcgaggtcctcagcaaacttcccctgagaacgatcaatgcgcagaagaacaggctggaaggcactttgataccggcatcagtgaacaagttagagaaattgcagtccctaaacatcgccaataatgctgtggtggtcttctcagccaacgacacacttgaacttcctaatttacatactctcctggtcggtgtcaatcgcatcacgcgtcttccatgtatgacttcctggcagtcactattaacgctgtcagccgaagaaaacaaaattacagagcttccgcaagggtttgaggagctcaagagcctcaagaaggccgatttcacaggaaatgccctcacgcgcttggatgagaaaattggattgatgcaaaacctttcctctttgcgggtttccaataacccacttcgtgagcgcaggctgctgagaatggacaccgacgatatcaaacgagacttgcggagccgctgtgagcctgatcctcaggacacagatgatgagggctcagtggccacgcaattcactctagcgcccgagaatcccgtgctcgatggcagctggcagattaaatctggtggaactcttgacaagtcttatgctgaaataaccgaccttacggtggaacaactggagatgcttccgtcgctagacattcgatgcctctatctacagcacaatgagctgagctgtttcccagcccccgcaattgaaatgctcgcacagtgcctggtcgagcttgacctctcacataaccccctgagtggtgctaacttcttgtcttctccgcttgagttgccaaagcttcagtcgctgactttgaatgcggctagcttgacgtcatgggagcctctcttgtccaaattaatagccccatctttgacattcttggatgtatctcacaatcgtttgaggggaccactcccccgtctgagacagacttacccagagctcaagacccttgtggcctctgacaaccaaatcactagcctagaatttgaagccgtaaaagggttgcaggtcttggagctaagcaacaatgaccttgattcgcttcccccgaagattggcctgcttgctgctggacgctctcctcagaattggggcaatggatcggcactgagacgttttgaggtggctggtaatcgattccgagtacctcgctggcaagtagttgccaaaggaaccgatgcggttttgcaattcttgagagagcggattcccattggtgacctgccggaatgggagcaggaacacgaagctcccgaagagttctaagacatgggatctagttggagatcatgatttagaaaggcttgtataatattaccatgtttgtttctatgtacatatacataatatcgctgtccatgcttttctcgggcttttatcatcccatcatcagcttccttgaggctttgtgatggatattcacattcagctttttacaattgacttgctgacctcgtcaatcaccttgagccacgtgttcgaccatgtagtgaacttgtcggcaggtgcatcatccttagcatctgcagcgccccagggtgatgcgaccagctccaccgcttgtgtggcacactttctcgtcttctgtagatactgggcagaggtttcaaaattggcctcgtacaacgcgccagctgcctcgtcgacatcgtccgggatagcttgcagattcagcatcaaggaatccagcttcttgacacccgacgaagaagccaacggtgcatttccggcgttcttcagccggttgttgatgatagctgggtaaacctgggcaataggcttgaggaaacggagggtagatttcttgtgttcctggagggcagcggtctcttcttcgtcatcctcatcatcatcctcgtccttatcatctccggccttctcctcatcgctgagaatatcatccaagaaaccatcgtcctcttcttccggatcccagtcctcgatttcctctaccgcgtcgcgaaccaggtccctccactgctcaacgcggcgcataacaaacccaacaacccctttattcgcaacatcggtcgtggaatcacacgcatcccagacacggcccgtagcgagcatcacagcatccttctcggatttcgtcacgccgctctccttccctgtatccttcttctcctggtctttcttctctccaactagcttgatctcccgaaccagcgccgaaaattctgtcagagccgtcttgacaagtaccaggacctcggagtgaaacgccttggtgtattgcgccggtgtgacgagaagggatgcggtcacgagcgacggcagcacggattcattgagctctcggagcacggtgctgacagcggaatgcgtgaagggcgaggtaatagccagcagggagagttttgtgacgtgtgctttgagcgcgctcgaggaggccgctagtaggggcagggcttcggcatcttttgcggcttcagttgcggctgttgggagcgtggtaagggctgtttggaattggctgatgagggttaaggttgtgccgaggatgccggatagttgtttggacatcgtgagggtcgtgggctggccaagggtggattgaagaagagtgtagtagagaaaaaattcgggcgataattatcgcggggctgattagggctctgcggggtcacctgtggtttctatgtcaaagctacggagtaagtcggggtgacggcgaaaagaccacgtttgcgcttggctcttggaacacggcaacactatcgccattgtacgtggtctttcgaggggaaatcgtggtcatttcacccagcgctcgcgttagagcattgaatataacactagccaagttaggtttagcgcccttacaggagtaagtattcatcatacatcaacgccctcggcgcgtacattatggataaaagatataaaggcagtctaagtcctcgttcagatatcatccctaaatatctttaaccctatacttgattatctataataactgtagagagcggtcgaatcggtcttaacctggtcttcttctagtccccgtcgcggtgctcaaagatagtaatctttttgttaatattatcaagatatttgcctcggcatcctttaacgagctcttttagaatgtttagataaagttcccgttttgaacggttccggaggcttgtctattatatggcgcctcgtgaaattgagggaaagataccggttttcatgcggagacgagggatattctggaatgtaatgaagatctatctgtggttactttgagggcatgtggagtctgtcaaattctccggaagatgtatagttgttatcatttcttgagcgtggaatgtcgttatccctaaccaaggcgcgctgtattcagagttcactctacatacaagctgttagggtcgtttataccgtgatacttagttcgttgatagcattgctgctcccctcaatttttggagcactacatcttatcaaggagatatggtataacgaaagggcgtaggacggagtagagagccccatccgttcatgatgttacttccatctttcttctaattcggagcggctcgagcttaagatctcagatataaaagcaagctgtatggcagcattagcatgtaataatcagttacaggccaagaatagaaggaaccaataactttatgacgcttccagttctagttacgtgcaaatgccaagatatcgagcatttcactatcttaactagaagttttagatagacctaataattagtatcgcttatatatactgcgactttaagtagtaggataattaaaagactaaggatttactagtaggcttactaaaacagctagctaggtagtattagcctctcctaaatagtgttaaagagctctataagtactataaagctagaatacaactattagctgaagaaatttccaaagtcctcctaatcgtagtagcgatatttttaaaactctttattattattaatatacttaacgaatgccaggcattagaccggcagcattttatattagagctttttaaccttcagatacaatataatgtaaatatctttgcgacatcgcgattcatatcagaaattatagatcaattcaaagacaccttatccttagagatccgtgcgaccagtaaggacgttgggatgtacctggaaagccatgtgagacaactacgaccttgtgtataattggcgctcgccctctaaccgccgaattatcactctggcaagatcgtctattatctaccaaggttcctccgcacggccgggtagcctacctgataacagcatgtgcaacgggtatggcagttggtgtacaaacgggcttaaaaagtctgccagagggctaggatctccgtttcatggtccgggttgcgttatttagtcagcgctttccgagaatattaaactcgcactttccgcgtctttgcttccttcactcttcctactactcctccttagttctattctcatcttcaccatggcttctcctcaagatcccccgtcagacgcgtgtaaaaaactcacgatctccgcaaagaactttacggagcacgcgagttttgccgagtctgtcaaaggcattatctgcgaggctaagcactatcagctattaactgtgaccgacgttcctctcgggtgggaggacttcctatgggaggctgacgaagacctgccggcaaataggaagacctacgatcctatcacaggtctactacgtgtttccatcatgcctaccaatggtcacgatgtagcaagcggatggttatcacgggcaatggtgcggtggactcgtgcggggcttacgattcctcaagaagaggacattctgtatactatgtctgatgcgagtaagttactatgatggatctcacgttaaccgagctaattttaagtaggcattgacttcaaatacggcgtatatcgaggctggagaaagcaacctgacgccgccttccgtatagtaggactgaatttgcctacgcttgtcgtggaagttggctggtctgaggggtatcctgatctccttgatgatatgaacaagctgcttgttggaggaaatggcgatattcgagccgttatcatcatcaagttcactcaacaaggcgtcaacgtttcaggcttcctcgaggtataccgactcaactcgcaaggcataccttacctcgcgcaagacgaaaccgtcttccccactccccaagggcaagcggccgctcagcagcaagtacgcgttacacgaagcgagctttttgggaagttcctcgttccaggcatgacgggcgcagatattctccccctcgatgtcgattggctccgtagcatttgccgctcccaaatcgcactgatgggactggttcctgtctaacggccttttcttgtctacacttgcttcactctctgctaacctacttgctctataacatcagtatcaatggaacgcgttaatatgttctggtcggtacttacagtaccagagttaacggccaagcagtcatcctggttcttgataattgcattactgatggtaacgccattgctctcgccaacaacagaggcatcggagttgtggccaccgttatcatcgccgtccgagttcttacagattcgcgattctaaaccgttaactggctgtccgaccaatagacacacagtattcgcctccaaccgccacattcaattggtggttccgtaccgcaagtggtacattgtctctcgtgcttctcctcgttatacaaatttaaagtcctcttttggcgctgcatgttacgatctggggctaagtggagctgtcgagtgggtcaatgcctgtaacgaactcgcacagagcgtaactcttgactacgaaaaggtaggcgttccagcgcctgtgactttcgtcttttgatttgatttgatctcaaatgtagagaactttcctggccagtcccaaaggatatctcgctgcaggcgtggaggactgatatttctatctcgctatatcaacattggatttgccattcttttagacatgaggcctacaggggattaaaaaagtagctgtaggagggttttagatccaggtcaaataaccgataatcaccactctttctgggctgaacgacgcggcctactgctgcgcgtatcggttttcttgcgcatactaatacgccgcttaatcgcacttagcttagctgatagaatcgattctttgtttaaattcgtaaagctatcttgtatccggatattcagcgtgtctttcgactcctgtattatattggctgtatgaggtttcctaccacctcatctagtgtcgccatcgtgttcgtggctagtgtcattcttgaaagacgattcttataacggagaaaaaggcatagcagctcaccaagggaaatactggacgactcttcggtcctgctttaggagggcgatacgatatattcaatgagcgtcccattcgaccggcggttgcgaaatactgcgctggagatgtcacgttgttaccagatctcttcaagttatatgacgcgaagctacatcgacctggagagggattctgggagcttcatatgccgtaagcaacccaagagcggatccggctttcacaaaatccagagtttgataattattcgaaatcaaatgctcgcgggccttgggatcgagagtctattgaagaagcgactaaccaatggaatgacgatgttttggataatgcattgaattgcgatgatgatgacgatgatttctttggatctgaagaatatgatgagtctggttgggtggataacggtctgaccagctgcagggacattatcaataaccgtgactacgaagactactattcagattagggtataaacaggctcagttcagttacaataggatatagtacccgtctgttgatttccatccgcttgaacttacagtactgaatctgaaaatgaatactttcttcaagaatgtactgtaatttatgtaaagaaaccacgactttgtccgagagcggttgattatatttaatcattggattatcagctgaaagattttctttcagaacccgatcacaacattgtcgagaagccaccgaccccaagaattctcacttccatcaccgggtcacgggctgagtgaattcagcctcatggatttatgccacgtcagacctgcatgtagggctcgaaattcacttaccataatatacgtcccccaccttatcgcgcaaccgtcgtatagatctcagctggattgtgttagaacatcattaggtggacttggtctatataagacaattggtgccttagcatctgcactcagccacaataacagtcaaaataggtgacctatacaccctaacggtagcatctaaaggtcgacaatgtcacgtctgtctagtgttcagtaggttgcccatcgccctgaaccccgtcagctaaataatattagaatatcattcggttataccgttcccctaaaacactcagcattttggtatacgcacatatatattaattacctatatataccatatatcgcatttcctataggtgttctggggtaggcggcttacttaccgaatacaatgactgttaactagtgagttatgtgtcagaatctaggatgaatactgtcatttttcatccctgatacagttgggtcacgtgactgaccaggttggttttccgcccgaaaaacatcctttcattttgttttatttgtttgattactaagttgtctatcagattatcatgttttctggactattgtcatttttagagagttagagaattgattgagatttttctgcaacatatacattcgccttaccaccgtttttccgtcaagattaatagtaaaaataccttactggtaggacgtatataggacgtagatagtaagaaaggggctgtaataggcgaaacattcggcgagtaacagttagggcaataaaggcgactttatagacacacacacagcgatgtcagtcacgtagagggagctagacccaaagaggtatactaaaccgaaattggtaattcgccgtcaccgcagagtacggagtacaatctaggttattatgagtctcatcacgtgcgtcttattgtatagcgctgcatcgctacatcgacaagtcagttaccttttgccgatatacctttaccttacaatgtaaatcatgggtatatattaagctaaacatctccgcggcattcccgaaatctcaatataattataatacaaatagtaattcccttcaacatgtagtctgcgtaaagataaattttaaggtcatatatatttatgatactcgctgggtaaattccttgtcgactctaatctctgttaggggaatctcatccccatcagaatgatcaccagcgctcggacccaacacattggtgtacgtcttcccttgatcatagtccggcctgaacgaggtatccatccctggctgttcccccggggagttaggatcatctggtaagtggtagaaagaatgtcgtttcggatgcttgttgtgctgcatgatggtggaagtggattccgcggttcctgaaggctgagtggcagcatccgtggttttggcatttgttctgtttgtacttctgaagatagccatcatggtgccgctgatacccagcatgcgtgctatgaaacggagagcagggcgaatggttgggaggttggccgagacgatgccggcggacatttcgatcgcggtccagccaactgttcgggcgagagtgtaggaggaatcagccgaactgtagctaaagagtactgagaaacggtaggcggaggcgaagacgacgctgttgaagttagattggttagaaaatgatattccagtttggaaatgtgttagtggcttacaagaatcccaagctgaaggcaactagcacggctaccttttcagaaagtcgaagttggagcttccaaacttgtggaattggaaggaatagaatggcaacatcagttgcgatcgttgagacggcgttggcgacccatgtagcaacttggtcgatgcaccggcctgggagctgcggataccatagtttctggacagggacgcagataaagatgaagagaaaggttatacagataacccaaaggatgataaaaagcccaatgacatatgcccatgtcttgaagtaagggaagcggaagatccgatagtacatgagcagaatgctcaatttggtccataccaggttgtacacgtagagaacttcggccacaacaagaaactttgcaatcataatcacgttttccactggaatagtgtccgcatggagccccattcccttatggatcatggcgtagatgaatccgacaacgatgaagttccatagcttatgtttgatcagaaaccatgcggttgggaatcactagcgtgcgagagtcgaactaaccatagaaaatatgaccatatagtcatcccaccacagcttttgcatccgctcataccgggcgagtagtcgaagacaaaccgtcacgaaggccagcaccgtgacagaggccgtagttgctacagaccatggctgcagactgtcctggttgctttccatgacggccggttcagggaggtagacatcgaacaattcagcgaatgttgggcaatagaaccttatgtatggagtacggagtacgcggctgagtttctgcacggaaaggctccatatttgtgtcgaatacacgcctcgtaatattccataaattccacttttgaacgtttaactagagtctgaacttagttttgtggttggcccacagcgggttaggcctctgatatcaccatgctgtaatacataatgttgtatgtatcattaatatgtatcataacatgtaaaatagactgtaggaattaagtaaataacggcttgcagatccaaagtaaaaagatccacgtggatgcagggggtttgaattcattttacgaaggttttggcaatatgaacaaggcccactctattaaacaaggaaagttacggaggagacagtgacaggacgagaaaaaccccaaaaaaagaaagctcccaaaatggtgaatgctagtcttaaaatattgatttttaggactattaaccgggtccttcagtggcgtttgttagctttccatatcctcgattctatacaaagtactccgtacaatggcagtatatgtactagtggttgtactttgttaccatctctagaagagcctcatccacctcctttgggttggtggcattcaagtaatgcgcacccccttcaatcaacacaagtttagcctccacggacgaggtgaaccgtttaatgtgttctgcaggaacggtcgtcccaaagggagtgtcctcagttcccttatggaggcgttaatgtgcaaatcatctacaatcagtgaacataggactcacctgtagccaataaacaggacatttgatgtctcggatccgaagcagaagtccatccctctccaataggcaattgagcgccattcgaaccttctttcgaccctcatcacccttatacacctccttcaaggtctgggtccagaacgcggatttggtttcggtggcagcggaaccaaagccgattccccccaccaatccgcaccagacgtcatccacaacaaagtcgggtgtagccgagggagtggaccacttctcataaaacaccgtgaggttggcagcgggatcccaacagcccttggagcgagaatccgaggattcataatccatggaggttccgaggggcatgagaccgagaatctggcaataagttaataccattggcttggcttgtcttgaggcttaatcagcagtccatttaaccccagggcttagacctaccctctccggggctaggagggccatcctagtcacaatccatcctccctgacttgtccccaggacgaaggctttctggattccaaagtggtccataacctgcagggccatttgagccgaatcccagtacgtgaagtgttccgagggagaactggtcgagccatggcctaatggctcgatggccagaagattcatggcatcggtcaaaacttgattgttgaattgatcatcgtagagagacacggtcatgcacatcgaattcataagcacacatgtcggcttagaaggatcatagtgattcttagagaaggcatatccagccttgatgccaccaaggtgtgggactttgacggtttgaggggcagccatttcgtaatatccagcggtcttgagatgaatgtgaataatctatgttgtgcaataatatacttttagaaggggggggggaagcaagtcattatgccgattaagggggttcaggcaagtgagcccctctatcttggtttttttttcttttttttttcttttacgtctttagaatgtactccgtgctccatcctccgtatggagcatgtcaagcccgagagttgggcaacgctctcggcatttcggcctaaattagtgattgatcttcaattgacagtcctgtggagtcactttcgacagaccgggttgtcgggatttgccagacttctgcacccaaagtataactccgtactaaagctgctcggcagtggggccggatggtttttgagatattactagcacattcaccctctaaaagccaattcaccatccgcgtattgaggtattttggaacataccgttagcggtttcagatacgaaattggagttgtgcatgtcatgcaaccacaagcgcggagatacgtctgacatcgtagccaacagatctgaactggcttcgagactagtccacgggtgggtacacacaggagatcatctgatagagcatccgcttatcccttgctttgggcgtgaaggatctgttggagacgtttagcaggccactctatgtactccgtattcatgattatattaaccgcttgtttaggcaggacggcttttcgggttccacaaatcttcatttccagaaacggactatattggcaatagagttcgcctctccaggtgtattgtcatatggttgtaacgcaaaggttacaaccactaatttagagtgtctggatatcggtgaaatgccgaaagcaacccgttaggatgtgtctaatatatatatctagaacctgtacggactactccgccaatatagtaggagttaatataaatagactatttaattaagtgaaccttttcttagacgtggagataatttaatagttaaacatgagagtgagagactgtgacaatataaggattatacttaatacaggctcagcacttaatcctgacctttagtttctcaatacactttctaccagacatggatcggtaaacgcatcggtaaacgcatcggtaaacgcatcggtaaacgcattggtcaacgcattggtaaatagggtatgtatgacttgcctcggaagaattgtttcgtgcagaccatggcggagctacttagtcacggatggataagtaccagattacctaagcaggaattttcaatagcaaacaagacaaacaccttcatcattgcatcccagcttaacagaagctgaaagccttttgtccatcattgccagccataatggtagcagcaaaggcccgtgctcctccaaggacgcccgcaacaccaatacagcccgtggagacgtcgcggtaccttccagacaagacctttgttatcgacaatggcgcgtacatgatcaaagccggctacgcttctcatgcttcggcctccgacgaaagcgtttccgcctgctcgtcgatacctaatgctctcgtcagaacccgcgataacaagattgtcatcggtgcccagctagcgacagtcaacgactggaatgaggcgatgtttcggcgcccggtggagaagggatatgttgtgaactgggaagctgagagagagatctgggaccagtctttctttgatgggaaggtgacggctcggaatcggaatcatcatatcgcggacccggaagatactacacttgtgcttactgaggcgccgaacgccttgcccattttacaacggcacgccgatgagatggttatggaggaatggggatttggaggatatgcgagatgtttgggtacggtagtctcatatttggtgatatgatcccgtactgacttgaaatcctaggtcccaccctcaacgcatggaacgaaatccattctctcttcggcgatccgctctccaatacatccgacgcatctatcttgcccgcagattgcttactggtcgtcgattctggctactcgcataccacagtgaccccggtttacaaaggccaagcgcttcaacgcggaatccgaagactcgatcttggaggcaagcaccttacaaactacctgaaggagattgtgtccatgagacaatacaacatggtggatgaatcatatatcatgaatgaagtcaaagaggcggtttgctatgtcagcaatgacttttctggtgacttggagcaagcatggaagagtcgccgaaagcgccagagtgggcccgaagagggaatcgtgttggactatgtacttccagacccgaatgcgaacaagaagggcttcattcgaccgcatgatcctcttctgcatgctaaaaagaagaaaggagcggtttccgggctcagcgcggaagtgttgtcggaggatgtactggtgctgggtaatgagcgctttactgtcccggagcttctattcacccccggggatattggtatgaagtcagccggcatacccgatatgattcttcaaagtttgtcggttctgcctactggcctgcactctgctttcttggcgaatgttctcgttgtcggaggaaatgctttgattccgggatttatggaaagactgtgggtcctccaaagttaattggttgaagtttttactaacgaactatctttttatagagaaaccgaattgcgacagatcgcctctgctgaatgtgtcgtgagagtacgccgggctaaggagtgagtggtcatccatctggcttgatcttggaagtactaacatcaatagccctgttcactcgacatggctaggaggcactcgccttgctgcaaatagggaggaactcagcaaagtatccatcactcgccaagaatatcaagaatacgggtcaggatgggctgttcgacgatttgctggccttgtataaggtcctagtggcctgaacagtctttattatgcacgggagttctttttaacaatggcggaaatcggcagcattcatagcatttagtgataccctagttttcagtgtcagtggtcaatgtacacaatcttttggaacgaatataaaaatagttcaaggctagaacaccgtactccgcacattacgatgtgattattcgctctaatgttggaataaaccgtgttcttgcctgcttgggaaatccccagatccatggatccacgtctggtccctgttcatctctacttttagggctattatattaagcacttcgaagtcatctccatcattgttttgcgagtcaacggaataaaagagatcattaagaagagttggtctcgccgaagccctcttgatacactggctacaagaccgcaacccctaggatgtagctgtcaccccataattaaccatgggctcttcaggaataagaaagaatatagcgtttaccaatccatggctaaaaatcccgtacctgaaagatgagatgcaccctgcacttctacataagaggatgtctttcccatattcttagatctggccatgcaatttatccccttttgaagggcccagcatcgatcctccaagttgataccgaatccacggcaatatggccaagagccgctcgtccatccgaaaactcctagactacttggagcgagtatttgcatccaagaaagttagcgaggaagtaggcctgtcagtaaagcacaaagccaatcaaaagcgaatcgaaaagcaatacattaactctcttcatagatgcacagggtgctttcaaagggtcccaacgaccaatttatttactgctccttgtcagcaccaatactgcccctcatgcctccgtcgaatgtcctcgacagccttgaacagcccgggtatgttcccggcaaaatgttgtttccaagagattcccacaacagcacttgaggcagtgatgagcccacgaaacataaagcgctataccgttcgatgggaagagaatagcatccctccgctagagcgcttgtactgtcctcgggcgacgtgtggccgatggattcccccaaagagtcccggggcacggttaggatattgtgtctgtcctcattgccgggcaaaagtttgctacaagtgtgggaactttttccatctcgcctggtcgtgtagccatgactctgagacgaaggcgaccttgcgactggcaaaggagaataaatggcagagatgctctaattgcctgtatttcgttgagaaggtggatggatgtaaccacatcatttgcaggtgtgggcatcaattttggtatgttcatgcatgcaagtcctaggcaaaaaataacactaatcgttaataagttacctttgtggccaacgcggccgatgcgcatgtcctgcacgcggtggcggatatgaagacctggacacagatggaggggatattgattttaatacgctggtcgctgcaatggagcaagcggaatcgacagatgaacctcattggtgggacgatgaggcttagagaaaggacgaggagaagtaatcaatatttatttcccagcaaatcgcaatctagaataatacaatgcagggaagatatcttgatcgaaatgctttcttcccatacgctcagcaactagtagtcgtagaaacccttgccgctcttcttgccaagccagccagcatccaccatgcgacgcaggagaccagcaggtctgtacttgctgtcaccagtctcctggtgaagaacgttcatgattgcaaggcatgtgtcgaggccaatgaaatcagccaggacaagggggcccatgggcacgttggtgccagtcttcatgatactgtcaatatcttcacgactacccacaccagtctccagacaaatcacggcctcgttaagataaggcatcaagatacggttggcgatgaagccgggtgtatcggccgacacagaggccaccttacccatccgctggacaaaggcaatggcagtatccgtggtctcctgggaggtctggagtcctcggataatctccacacccttctggatgggaacagggttcatgaagtgggttgagataacccgggacgaagcctgaaggtcagtaggatccgtgttggtggcagaggcgatcttggtgatggagatggaggaggtgtttgttgcaaggatggcatgcttcggcgcgatctgggccaagctggcaaagatttttgacttcagatccgggatctcaggcacagcctcaatgacaaagtcgacaccggagagaccttccagcgtcaaactcgtagtaataagcccgcggacttcatcagcttgctcttgagtgaggcgctgctttgctacattcttttcgagaagtttatctttcatccaatgccatgtcagataattccaggcgattgcagtaaataaactagaagcgtaccggcaaacttaaggcccttatccaaagaggcctgcgaggtatcaacgagagttaccgggacctttgcattctgtgcagcgacaagtgcaattcctaagccctgaaaagtgttagacctgcagcgtagctgtatattctatgttacacaccatttggcccgcaccgacaacgcccagtgagttgacctcggctgcgcggactgcagaggttgagcagaagttgcgggccaccgcagggcctctgcggagggaaacaaagcgaagagtagaggtaagcatggctgcagtgatttctggaactatgggaaaaagaacaaaaggagggaagaatataagtgcgcagaagtatactgctatgacttcacgtgctttcggaggtcattgtaaggccctcgacagtggccaccaagcgtatatttcaccgccttgatgattccatttgcaaataacgacttcttcgaatataccggcttcattttacgatcacattatagatccatggatatagagcagagtcgaggattaatgttgagtatcatggggctgcctgttatccatatcattcagaagaaaggccccgaaaagggaacaagcccaaagcttgagtactccaaaaatcaaaatcttggaagtgttttaaaaaagtctagtgagaaattatagctcttgcaatatccaggccaggttcttgagaatatatctgaggtcttgcaagttcaagggttacttacctcttactactcagatctatagatctgatattttgccagatattgatattgccgcagtggccgttgatatttggcgtaaacatcggttatcttcggcattttggcggcattcagtttctccgaggcgccgacgccgacgcgtcnnnnnnnnnnnnnnnnnnnnnnnnnnnnnnnnnnnnnnnnnnnnnnnnnnnnnnnnnnnnnnnnnnnnnnnnnnnnnnnnnnnnnnnnnnnnnnnnnnnnnnnnnnnnnnnnnnnnnnnnnnnnnnnnnnnnnnnnnnnnnnnnnnnnnnnnnnnnnnnnnnnnnnnnnnnnnnnnnnnnnnnnnnnnnnnnnnnnnnnnnnnnnncgacgccgacgcgtcggcgcgttcccattcaacccgattcgggaagcaaattaatggggtctcaaaccagcccaccatggatgaagaggttgttcctctaggacacgacgtgcaagtcgtggacccagacgtgcgcaactatgtttacggcctggttactgctgtgagtacacttctattttctccttgccctggctctgggtcaattcgctaatacgcttggttatccagctcggaggattcaatggcgaagatgctgaccaatacgtactcggagacgatgcgctggcatgtctacgcgatatcaaacgctggttgaaattgtacgatgaaaagaataaccggatggatgttgcgcggtgccttggagaggccaacttgatcaatggtgatctgcttccaatcctctcgctctggtggactagtgggcagaacagcaagcatatgaccaggattgcactggcgtgcttggaacttcttgtgcccttaacatggcccgtggagattcatagccagatgacagtcaaccaccatcgtcataccccctacatccaacagacacaggtgcaatacaagcgaggtatcctgaggtccggaggattgaatattcttcgcgcagtcattcgaatttctcttccaagcatggccacccctcgatccgaacgtggaacccgagacgaaggaattctcaagttgatgttgtacttgctgcggaatattgcgatcatatccccgaataccagacttgcggcagaaggtgacgaggaggagacatccagatcggcaacaatcaacgccttccatgagcaagatgcatttgccctccttttgactatgtgctctaatgtcggcgaagacttcaaccttcaagatattcctctgatggagacaattttccatattgtcaagggtgtcaacgtcgagaaattattcatggacgatgagcagcgaaaggccaaggggactgacgaactcggcgatctactgagaaaagaatcattggtacggagggaatacgcaaagaatgcacccacacgccatggaagattcggtacaatgatctgggtcaaacgagacgatgagaagatgtctactgtctctggacaaagtgtattgcgcgacgaccagactacactacaaaagatggacgagagtaaaaagtggaataagcctcggcctcgtcgcagacaggaagatgtggaccaaaatagtaacttcaacatgccagctcaccttagttccgaggcaactaagaacctgaggactttcgtggaggagttcctggattctggattcaatcctctattcacccatgtgcgaaaagcaatcgagcgtgaagctgagcgtgtcgtaccgataaatcatcgccaattcttctacctagtgggttggttccttgaagcggagcgcatacggcgggctcgacagctccgtcatcgcacagctcagaatggaggaagaaccaaagatattgaacccgatagctatggtctggttgctggcgtcctgaaccaagagacgttcatctctttgaaccgtgctatgcagaatagcctagacaacaaggaatgggaagatatcaatgcccagatgcgctgcttcacccagattctgctgactgtccaggaaatggcagtgtcaccgctcgaagaagaccaggaaattgcggagaatattcaaaaccgtattttctacgaagaaacaacccatgaccggatccttactattgtgcgcggatacaaagatcaaggctttggctatttagatgcctgcacggagttagcacatgtattcctgcgaatgctggaacggtattccaaagacaacgccgacatgcaaatccgctcgcggcgaaaggccaaacagaagcaaaagaaggccgcccaagtcgccgaaaaagagggagaagatgatgatgaggagcgtgattctgaagatgaagacatggaggaagccgcccaggtcaccaaggaacgcagctttgactttaagcgattctcagccaaattttgcaaccaaaactgtgtggataccttcatttcattcacaggattctaccgggagctcaaccctgagcagctcaaacgcgcccaccgatatttctaccgtattgcattcaagcaggagatgactgtcttgctatttcgtgtggatatcatcggccttttctatcgaatgattaaaggcccaggccccatggactcaaacgagcctatcttcaaggaatgggaggaattggtccggcaaatcattcgacgactagtcaaaaagcttgagcagcgccctgccttggtcactgaattgctgtttagcaagatcaactccactatctactaccttgaatatggacacgaaaagcaaacgatttccacatataagcgtcccccgccggagctcatgattacatcgacggaggcgacgacaagggaagcgaaactgcacatcgtggttagtgctctcgttctcgatggtagagcagatctggctacctggatcaaggatgtcttgagctctgcagcctccgaaagagaggactgggaaactcaagaagaagtaaatcgcgctgagaactccgagactaccggcgttcccaatccgatgattcgtatgttctcctaacaccctatttcgcgactggtactaacaacaaaacagctgtcaaaggcaagaacgagtttgttcagaatgccatgttctcgaacgcaaagctacgtctgctcatgaccgtcgtcggattcgagcgactcggcgttgaagatgtgcttggtgcctcttgggtcgtcccggcgtctctcaaatccgacgacttgcgtgaaacagtttctgaaatcttgaaagcccttcaaaacccgttctccggggatgttaatgatgatcctcggaagcagatccaaccaaagcacagaggaagcggtcgcggcagcactactcaaggcacgcttgatgtcaacttcggatcagagtccgaaggtgaggatattccagatggtcctttattcccagcgaatctgcggtcaaagtctagtgcgctggatgacctcaaaaagaagcgcaagaagaagcaaaaagccaccacagaaacggagccactggatgaagagactctagaggcgcggcgcgatgcgcgtctatcaaacgcactgtctcgccaagcgaagatcaagagtgatctgttcatccatgccagcgacgaagaaagcgatgcagaagccgacaaagagttcttccgacttgaagaagagcggagaattcaacaagcaaaagaaatcaagaaggcgttgctcactggacccgtccagcctccaagaaagggcagaggcaagaagtctgccgcccgcaagcgaactagcgacactggcacttctgcagccgcaaaatccaagcgacaacgtcgtgattctggttctgctgctagcgaggctgggagtgatgccgatggcgatatcctcatggcagaactcgacgttcaatcatctcactcccagcaaggaatctctactagtcatggcgccggagaggacgaagatacccgtcccacgccaagtgatgatgatcttgcttttgatgatgatttcgccttcactcgagatcatcctagcaaaccccaagctacggagcccgattctgtagacgatgacgtggaagatgagcctgtggttctggcccggagacgtatgcgcggtggatttgtgattgagagtgactccgaatagtgagctcactttgatatttgtgagaagtttcgattatgatgacctgatgaggcgtttggcattgtgatggaaacggaattgtaaagcatcggatacctaagctcaacgagaacaattacgatttcatatttcaggttatcgttctatccagcatagacaaactgacaccctacaaccatgccgagccccagggaatgcgccagtcctgcaagcgagggttggcatcttgggcattgtggaggatgagaatttgtttgtcctgttcgtcggatatctgtgcaagttccacacatcttctgtcgtttaaatacttgaattgttctaagggggcatgtctgtgagtcaaaagcgaaaagtgggggacttgcaactataaaaaccacccgacgtccccgacatccccgatatccacgacatataccaatatcccaaatcccaacatgactcatcttacattcgtcaccctcgatgtcttcacatcgacaccctacttcggcaacccgctagcagttgtcttcctcccagaagacgactcaaacgctctgacgcagagccagaaacaaacaatcgcacgggaattcaatctatcggagagtatctttgtgcacccagtacgcgagaaaagcaagcgcaccatcgatatcttcaccgcagactgcgaaatccccttcgcaggccatcctaccattggcgcggcctcctggttcctgagtcactcaactgaccccgctgacggcgatggcgtcaccaccctcgcgaccaagtccggcgacatccccatctccgtccagaacgacgtgaccaaatacgtcgctgcgcggattgcgcacaacacacgcatccatgctacgcggttcagcttgaaggaattggtgaggctgcaccctacgctagcgccgttcttcacgcggccagacgttactttcccgctcttttccattgtcaatgggatgagtcagttgttcattgagcttccttcgcttgaggcactggctgctgtgacgcccgcgaccggcggtgagctggtctctactgattatcttgatgaagggtggaaggctgggttaatctgcgtgtacttcattgttcgggatgttgaagatagtgttacgaagaagaaggttattcggtctaggacgatactgggaaacctggaagacccggctactggcagtgcggctagtggattggcggcgtacttgacacttacggagggtaaggggggtcagaattatcagtatcacgttgtgcagggtgttgaaatgggacgccgcagtgatattggtgttgaggctacgttgtctggcgacaaggagattgaacaggttgtgctgacgggcactgctgttagcgtgtccgagggaaaagtgctgattcctcatgcctaaataacaaccctagagctttaatgagtcataatgcaatacttttgtatagtcttctctggcgcaacggcatctcccaaggtcaaggctgcctatgattaaattcattgctgcctgtcgagagaaatagctagattccatagtcctggaggtacctagtgaagaggaaaggcacgatgggtagtctggcagagcaaccaacaacaccaaccttccaagtaggccaactagcaagtataggagatcatggaacctcaatcattcaaccttcctagtagaaatatccttgtaaaatgctaagtcctttcgatttgatatgatgagccaaaatacctttctgcctgaacaacagggcaactacacgatcctgataccccactacccaaggtagtagtactaccctcaagttcccctcacgacttcggatatgcaatccaccttcacctaccttgtgtacttcctatccttctgggccaccatggttgaagctcttactcggtatcagaccacgcccccgagcgacgccattgtcgtccatgacagacaatccctcaacgatctagtcaagattcactcggatacagttctctacgccgagaatggagggtattacctcaagaacatggaagaagaggttgttgccatcactgccgacgacctgtgcaaggagctggacgctgtttttgccagtatcgatgccgaagttggctctgggtctgaagatggagaatctggatctctcggtggggcaaatgttacgaaggggaactctgtctgagctacacagattgtcacagcacatggcacacggcacactgtatctagagtgtgctgatgcgcttgatggtgttggaaaggctccacaaaggccccgggagatttggctggggcagtgaggctggggcagtgaggctggaaaagaaattcagaaaagtgggcacgtctgagaaaactagctacgggcctttgggttgcaccagaagctattgaccactaaagaggctaagcccattgaatttattgcatccatagatagtgaattcaaggctgacgctagcataccttgtccccagagagacctaaaatgggattgctgtatcatccgtcaagcatgcttcttcggtaaaattgcccaagaagacatgtttccaacgaaaggtcctcagcctgaccgatggagcaagccctcacatacaaatcaaccggatttccggcaggctcttgactttcgctattgcaatctgttagaaagaagcccttgccaaaatatcatcttaattgatttcaaggtcccctttggcccccctcttcttgccagcccagccatcgtatctgtctcagcgtgcacgtgaatggaggcgcagcggtggtaaccctcatgctgccaattggggacttggctttattcgtggttcacggagtacgaacacggagtctccccccggtccaaaaaaacaaaatggaacacttcagatgaatgttgcaaccacccaaacattacaaatgaatcattctgcagaaggcggtgtttgttctcattctaaatgtccggtgtgctgcgccacagcctaggcagggtcagttctatttcgggttaccacaaggctgagtgcttgccgtggcgtagcgtttggacttcaggggactgcaactatgtaactaattatgattctacataggtagccggccttgcaagtctaaacggttcaattatctacattttattcctaaatttgcgcattaatggcgaaatcctctaaacttcatcggtatacacgacgccgagaattacatgcccgacaggcaagatcaaaggcacatcatgtacaggagacacatttcaccgaacctttggaacacgaacagtccccccttttcaagaggtatatcctcttgtacctatcactctactcctaacattgtaaccctaggttcttctcccttccacaagagatcaggaatatcatttacaggaaacttctcgtgcagcgatgcaaatttgatttggaacactattacccatgcaaactgcctattttttatggcagaccgggcccagatccacatcgccgggttatcgacagcttcgaaggcccccaatgtgcagcctgctgtagctacacctggaatcgggcacaagtcccgatatcgaaatcaccagcacgaagccagtgggcaaagccatataaaaatccatatctttgcgacaattgctatgggacttgaacgaaagtgttgacgggattccgtgcttgtagtttttaccatgcctatgcggaagacatgagaatctagccattctgctcgccagcaagcgattctggaacgatgctgcaccgatcctctggaaggagaactggttcgccttcgaggatcctcccctcctaacgggattcctgactgctatccgcccgcaagtgagatcgtggctaaaacggatatcgtttatgcctcttcatccttatctgactagcggtatccccagtagtacagatacatgggtgccgggttcgatctggaatgggtgggatgatattgaaaactgctggggtctgctgagactatgcgaggggctgacagagctggagcttgatgtagtgtttttgacacgcaaggaatgggctcaggctattcgactaatttctgtcaagaaacaagttacctttctccgccagatgaactcggaggatgttgactatgtgactgaagattcatggaaccttatatggaagtcgcacgttcggcggaaacgattcgactcgcccacgactgctttactcgcttctagcatgactggtgacagggctattaaaagaaaagttctgctgaattattactctgagagcaccccacatcaaagatgtggtgattacggggtcaagtttactgaggacatgaacaagggtcgaagacgggtttcatgattgtcaaggacggcgtttcccgccaatcatcaacttcaaagcttcttctcctcaaccaattgcctcaacactttgattgttccctcaactgctgcctggctcatcttcttctccttctcgagtagctccgccagctccacctccgagacacctgggtgtctccattcgaagatatacgtcatgtacagctctccaccagctccttgactaatcacattgctgatcttgcttccatttggctgatcaaagtctacccgggcaggctcgaaagctgtaacggtctctagaaccttcttctgggtttcgcggaagaggacttcgcgaacggtgacggcgttcccagttaatgagtcgatggattcactgacgaccctggtggattgaattgctcccggaacgaatgtttctgcggagcggatcttgaggaggaggcccttccaggtttgttcgggggtgataacgggtcttgcgcctggtgggttgatcggggcggtgaaggcgacgttgttggttgagctcattttgggaggataggaaaggaaattctcagtaatttagatcaatgctttgaggaattctgatcaccaattttgtccgatcttaaggcttttgactattcgatgttcgatctagggtgcgaagagcgatgacgaagccgggcgataacgctgataaggttaataagctcggcgttacggtggcccggagaccgatgatctctaagacttctgccttgtatatcaggcctcaatgttacccgatcgggacaagcagggtttggattcgggccatggaaaggaggacttgagaatgctcgacacaacgaaaattgagggggttttgaaatatgatgcccctccaagcaggttgcttatattcaaggctaatctgtatcttcctctggaatggtctgatgatccaattcgaaaagcaaaccctcgatcctcaagtacatagcgcagtgctttgcatatcagttcattcgcacgctccaagatattggatactattgaaattgaaatttcgatggattcatctttttgtcccataactaaacattcaatcaatgaactcggtcataacgaacgtggaatctctgaatgcaagagattcctatactaccgctaaatcaatcgaagaatccatgacccttggaaggcgtttctaaacttgggctaggaagttttactcgtaagcaatgatggatggcagaatacatcctgggttatgaaggtcaccagaacagcgaaggataccatggaagaaagggtcattccgctggtcactgacagatgagggatggatgctcaaacaaaccagttccccgataattccgaatttgtctgtaagcaaagtggcgactacatactatacgtacatgtatggatattccggaaaatgaaggccgagaaataaggttgttttagtgtgggggggggcgcatcccgcattttgtcctatctttagttcgcctatcatcagccacgaattgaaaacacataacagcaacataacagcaacataacatggaatccctgagttccggtctgatctacttggcagactcccgcatatcagaacctagatacctcaggcactcatatcatgtggatttaatctacaagggataacaagcttgtctgcacttgtccagaagaccgaggtctccggggagaaaatgaagtttccatgctcgatgatattaaatgccgaaggctatatcggggtgataagcgagacgcaaactggaattctagtcgtgattacgatattgtcatatgttcatcagatagaagatataagtttctgtacactccgatatgataatactacatgagttctagctttcaccagagacaacatacaccggagctgcacggaaaatgaccataatagccaactgtggcctgttcgaaagctactggtttttaatacatctaataatcaagaagctacgccccggtgtacgaatcaagacagcacggaatccgctttccacatcaagtcatggtggtcatcatatatcggcagagataataatgacataggaagcggaagcaaagaaccgatcaataaccagcgttcaatttgaaactgctttatcaccacggaaaatacgatccgggaattgttcaatacatccctgagctcaggctataagtgtctcgctgtagaccctccgatgaagcaatagagccagagaccttccaatcgattatatttctcatcacatcccttgaaaaccaaacaaatccaacagagaaccagcccgcaaatatggccgtcgcaatgcagtccgcccctatcagcctcgagacaatgtccgacaacatcgatgctgtcaatgtccacaagacagacctcaaacaagacaaaggactttacgatgaatccgaattcgacaagtccaaagacaaggctggcttccgtcagttcgaggatgcctgtgaccaagtcaaaaacttctatgcccagcaacacacccttcagacggtagcatacaacctgaaagcacgcaacgacttcaaaaccaagactcgtgcacacatgactgtttgggaggcgatggagaagctgaatacattcatcgatgaatgtgaccccgatacctccgagtcccagatgacccaccttttgcaatccgctgaagcaatccgcaaagagggaaagcctcgctggatgcagctggtcggactcatccacgaccttggcaagcttctctttttcttcggggccaagggtcagtgggatgttgttggcgatacctttgcagttggctgtgcgttcgacgacaagattatcttcggtaacaagtctttcaaggacaatgaagactataacaacgaggtctatagcaccaagtatggaatctattctcctggctgcggattggaaaacgtcatgctttgctggggccacgacgaatacctctaccatatcgtcaaagatcagtccacaattcccgaggagggcctggcaatgattcggtaccattcattctacccgtggcaccgggagaacgcataccatgagttgatgaatgaacatgatcataagatgctggaagctgtgagggctttcaacccttacgatctgtacagcaagagcgacgaagtcccagatcctgagaagctgaaggtaagcttgacccttggatatttggattctaccacgatgcatgctaactcggtactggacagccttactacatggagctcattgatgagtacttccccacgaagatcatcaggtggtagttgtgccgcactcttcctgtttttacaatcaaattgatactagctaaattaggatcagcccgttgtccctttaaacattccctgataattataaaacaagatgtaactccctattacgtatctcacatgcgagcggtgcacaagttgaacggcacagtccaaaacacatagtaagtgcgataaattacaacttgatatctcaacaacggtggtctattaattctgaaaataataacattgttgttggaataagcggccgactattcttgttctctatactttcaattctacagtatctatactagaactcattctatcgcccaccagattcattactgtaatatcgctaggacttgaatactgcgataaagtggagatatggagcatcgaattgtggaagcaaggagcaagaagtgatcgatcgatatgttagttgtggagagaactgccatagatccatatatataagctcatagggataacgaaaacgaaacaagagtcatacacgggcaaagagaggtctgaaaaactacctaatcaagtaacgacaaaacaaccaagcaggcaacggtacataaaaaatagaaaaggattctggcacgcattgtggcctgatttggatattgcctacatatttcagcgaccagctccttgatcattggcagcgagcatacccaggtaccatagcgctaacaagactgtcaattgtgattgcgcagcagttctaccactagtgaatggaatagtcgggacaagttcaaggttaccgtcgaaacataactagttctcggttagttataagaaatctatatcgagaatagtgctacttcttataccaattcacttaactaaatggttgacagtactccatgcgcacggtatgactgggatatgctgctatagcagtgttccatttccaagacagcttgatatctctaggagcgtggttccagcttatgccttccggaactccaagtgggtaaaatgaagtatcaggtgtgaaggaatttagaattattgcatactctccgacgtcgaactcttggaaaaatattgtcggatatcgtacttatcaaagcattctccgatatgatggtgaggtcggtagaggattcggtggaaggcgtgtctgtctaagaacgtttccatgtctttgcaaaatgatgttcaattcggactcgcgccagaccccaatgctgtggaattttctgcttcataggctgagtttgttgtgtcgagttgaatgaggtgtaggtatgcctacttggccctccatagctgagtagtgataatatgcaaatcaacattggaagccccgaaggccgggttatccccgagagacccttggctctttgttgtgaggtctcacagttgaaagttgtggacttgccgagccttcgcttcggtatttcagagatgcccgttcagacctgcgtcagctaaatgatgggaaaaccagatctaagcggcttatgaagaatttgtgacagagcgttcgattcggaagatcagctacaacctagtaaatcggggccaaggaagagcttgatcatcagttgcagtaaaaaacatatgcttcgtcgagtttcccctttgcatggtcgcaggcctggtgaatgtggttagacaacgtcatggcacatgccttcagagggaggagttctcacaaggcaatcgccaatgtcaacaacaatttgttcttcatttctgagaagctgctcctgttcactggtgatctgatgttcgtcgtaggtttctgctcgatcaaagtccatccacaccactctttcggcagtacctgtaacgaccatcatgttccttggtttgggatccctgtgccgcactagggccttatgtatttgttggataccactgatgagattatccatccgttgctgcgtataattctctagagtgatcatttccagaccggtgatatactccaagaatatggcgctaggtgggtattcgtcgtccaggaacattttcaagtggggtaggcacgcagatggatcgaatttcctcatagaccctaggaaattgggcacgattccacggtcacatagacccctgtctttgagttgggtgtaggcagtggtttcaagcacatggatgtcgagttcacagttctctggttcgtaatattgccgtgggccccttccgtgatgcttcgcatgttagtatttcggtagtcaaagctacctatgctggcttgactcaccaccttcataacacatgtctggccgcggacagtgacaagaaatattacggaatatgaagaggcaaaaatcttcttctggaagcagatctccgtgggatataggttgtcaagatttgacatgatttgatctagtcgtgcacagaggtgccaaaggaaacatgctctgagagataaggcaagtattggtgaaggaagaaaggagcgatggcaaagcaccggtcacgtataatactggtcacgtgtagtccgacctctgggcgcctgaaacagcggttgatgacctcaccgaagtgtatcgccccttgaaattcttctataaaaaatacggatacttgcgccataggggattgtatcagagactcccacatggttattcgggacccccttttggtttattcggactcctgctgtctgatctcttaggcttcaactgaccgcctaccataaaagttcaccgcttttctggccgcttttcgtacaatttactgtttatgtttgctaagcgagaaggttcgatgtttgcaatgtttgcaaagggtcaactatacgagggatctggatggcctgcggccgcccgatagtcgttgcagagcaaaacgactgattctaacttctaatgctacgtaaagtgtgatgtagaagctctggggaagataatgatggttctttctctagtctatttattctgccggttaggatattctgccaaagttagctgaccgcatagcttcttatgattttggagcccataggagaaaagacctggtcacgtgacatgcccgcgaggttatgatttaattgcttcgcttcgctccgcaataatcaggccgtttcccactttgtaacttacttcttctttctctccatcttggtatgcttctctatttacacgtgacctgacatctcacaataacttaagggcatgttttcaaaggtcgtcaatacatggctccgcatttcgtgagtcttagggctggaatctggggtcaatttccctggattttcctacagttaatcttgttacggtcgaccagtagcaaagccctttcatttgccgacctaagaggccaagacctaaacgcctgtggatctcagactaataaatttaaacaccaacttcagaaataaatgaccggactctgattattgcgctaggtaagctttagggttaaaggtatatgtggtggaaatcatctataagcctccttatatgtccgtcagctagcaataacctttcatctactcttcttcgaatttctgccacgatgtccttcccgcagcctactccgacggtaatctcgagggagcatgtggatgaagtgaaagaggctacctctctaaccccaatgggcaagggaaatggagatgacaacaatctggatgatattgcccagatattaatggaccaggaggatattgaatacccggccgagggtgagtattcaccacttttgtagtctctatcgacctaatagattagaacatcgaaagctactgcgaaatattgattggcgaattgttcccctcgctgcttgggtctgcggtctacgatttgtggacaaggtacatatgaaagagcagttcctaccatcccatggattcttatgcgatattatagtctggtcttggccgccacgacatatggtcttcgcgatgatcttcaccttgttggccaagagtactcttggtgtgtttctgtatggctccccagcttggccctctcaagacaagaccactaatgaaggtggggacagatattctattttggatacctgacagggtctttcttctctggtcgcggcctgcaatatttccacgctggaaagtttatgggtgatgccttgctatgttgtattggggccacgaatttgctttaatattggtattgaggttcattcttgggtacaacatattcatttgttggcaataaaatctgtggctgataagaccttaggcttttcgaatcatgccttattcctggactattgcttgtgtatgtcttgaacaaatctggatgggtataagatataagctaatgcactgttcttcagcacaaccatgtggttagtgggatatctggcaatatactattcatgctaatgagatgaaggtatacacaagaagagcagcttctgcggtttggtttatggactatgacaaacggtgctcttccggtgcccttcttaatcatttactatggtctgtatgccaccagatctctcttttcaaaaaatctaactttgaactgcggggcttagtcatgtcacaacaggtcccatagttagtaggttcatctttgtctttatgctttgctatagctaacgtctgcagacatcctggcggctcattttcctcatcattggtctcttgagcagtttgacaggggtgcttatgatatgtgcagtctactatttccgatgtaaagcctaatttatctagtttgttttcatgcccgatgcgccacagtctgcaaaatggctaagtgggcgagaaagggctatagctgtcaagcgcgttgcccaggcctagcttggacttaaagatagcaagccacctaggaacctgtttgatatcatgtactaatcatcttctatagctcatttcaagtgggagcaggtgcagggaacattgagagacccgcatgcgtggttgttaatcttacagatgttgttctctcagactgctgggaatgtgacaacaaacttcctcgggattgtgatcaaggtaatacccaaacgagcaccttactcattcatcaccttactgataaattaggggtttgggtacactgcactgaaggcacaattatataccacccccaactatgccattcaggtaaagagccgcctcattccatcatctaaaagttaaacactaaaacgtactctagtgaacccaaatcctattatcctcttagtatattgtattccatgtcacgattgggattcgttccttcccttttcgttccttcccgattgggatggcgagtcagttgttccttcctgaacaagtaagcgagaatagggctttgatcgcaggggtataagatccccaccgtagctctgttagaaatttaatctttctctttgcattgacttgacccgtaatactctaactgtcttctctgagcatcctcgctggtaccgatctttctgcggcacacacctcatacaatatgaactatcgcctgtgtgattacaatcctaacacggctgctcccggatcatcgaatgggtgcggagcccacacggattatggaaccttttccagtatcttccaagatggcacgcccggactggagcttgaagaaacccctggcacatgggttctcgtccccggggatgccactgttgtcttgactggttggtgtgcggttatcctaagtggtagccgggtttccgccgccaaacatcgtgtctgccgttccccgggcgtgcgtcggttgagcgctgttttgttcgtcgcccccgaccttgacgtgaaattgaagcctctgggtgattctcagccgatccgatctttctccgagaccatcatgcgtggagacctagatgttgagaccttcaaggacgttatggggaagagatggcgataccgagagggaaacgaagagatggacaatgcggactccctctcccaggataacgagattgagaacatggtgtggggctaagcttgtgatgacgtccagcattgcctaaaggtagctctgggcatttcttccagatttcatggcactttcccgggttccaggccactatttctttgtcctttcatctccatgaagctatttagaaggcatggcagaatttcatcagcagtttatcccacttgtgttggtcaataatctttctatccagacacgtagacgagatgcgtgcatcagtatctttctcttctccacttttctggtgtattggctttaaatgagtgtatattcaacggaccgcgttccaagaggaagtattgggccatgaacttccaattatgagtataaagttcgatctactctagaagtgctgttccctgcgatttcgttatttatatatatcatagtatcgataatcggatcaatattctacatatagtgcatctcaacgttatttaggtatactggacctatagtgacactaaagtgctttaggatatcggacgccactcctatcattgctaagtggttttcggtggatttatcaaagcaacatcttgtccttcccagagcttaaatgaaaagtaaacttgtcttgggtgaaatgcgtaagggacaacattatatgctacgcggttatcctcttttctacagccaattttgagtataaaatgtatataataacaggtaaaatcgcttgtcattggttgtcattaaggaaagtggttggtatacacaatattcagaccataatccgagtcatcatatcacttcattcaagggagagcagcaggggcgtagctctgatcaggcttgacaaccacaccgccagcaagctgcttgtcggtataggcaggccagataatctggcgagcctcattgacaatggagagagtagtgaagccattctcctcgccgaactggccgctccagccggaggtgacggtatattcgccgcaggtggcggggccaccgttggccctggaggcaggggcaccctccacgatgtaggtgcagggagtggcatcaccggcgccggggtagatgccaaaagtccaggtgcaggaggtgtcttcggtgtcgcagacacgcttggtgtcctggagagtccactggggggtgtcggccatcatggacttggcagaggtgtcggcgggggcagcgaaggccgaggaggcaaagaggccggtagcgaggaggagctgagtgagctgcatgataatggttggaatgttgagtttttgattggattatttagtcttgatggatgttggtgagaatgaagaggccagacagtatgggagggatggagctatttaagtactttcctccatcatctaatatcaagtttcagctcattgcagatgactctgaaccctttcgtcaagctcgaaatagaactatagggatacatgaatgtaacgtcgagtcaggtaacacccgtggacccgaaatacgttgctccacaacagtagaagtgagacagccctgctagctatgatttgatttgtgcattcctctctatgaccttgtttgtttctcgacatggttgccaacataagttccgtttttatctaagacatcgtcaaaacccaacgaatcagatatttctacagctgcaggttcaccccgcaaatatggtcagaccagctgtcgatcaccagtcgatgactctgtgtcatattctcttatacgaagcaataatgaatgctgtatgatctgatttccgaaggtaactatgtattctggaccctgtaaccccggttacgccacgatttccacgccacccttaggaaccttggaatggcgttgcggaaaaatgatagaagtgggccaaggatattgttgattggtgagaacattgcctaagtggacatctttgatgaatagccgacataccgccttcccggtccgcattccatatccggacaatagaactgtatatagatacatttatacattaatagatcatgataactcaatgttgaggaaaagaacccagttaggctccgttctggatggttgggacctaaatccaacagttcacctgatgaccactttttttttgtctcgccacatatcagtcgccaagtctttcgtggccgcttacgggagattgcagacgatctttcaatttatcactcagtaggcgttggaaaatgaaaggatcgagtgatccggggccgcagtaaacaccgattcgctgatccttccccccactcattcgtattctgtattgtaggtaggctgtaggtaggccccttacgccaggagcttttcgcttgtccctcagacagagatctgcgtttaatggtgttgtgctggctacggagtactgcttgccttaaatgagctttgaggctgtgagggttcgcctttttcttgcttgtcagatcgcaagccttctccaagggttgatttcacatgacgtaccacgttaggcgagccatggtccattgccactgtctcttcccagacatcagtcaatccccacatcgaactaaattgtccgctgcagatcgaacaggtggtagagatcgttgctgggcgtggtggagccgggttttaccgtggcggtgacgtcggaatgtacagcgcaatttccaggctaggaaggcggtatattttctatttataaaccgaggaggcagtattctcaccactaggaactatgtatgtgtcctcgtccgatgaatatcctttagcctccgacctctatcaatagttaacacttcataccgcttatgtgcccttggcgaatatactgtcccatggtttaccaatatatgggctgagccgggggtcagcaatctcacaatgccatatctgtaatctcggtccaaggaacgccctccgacggatgttccaagcacaaacaaatttgcgtcgatccagggatcctcttaaataaattatatggtgacatggggtagtaggtgatccgttaacacgtcctgctgcaatgttcgccttggaaatgaacacgaagctcgttgcggtgggatagggctcgttggaatatagtgttacagtcgacctcggtttcattgaggcccttcaaatctaagtgcgccttgaacgtcctcagctggaaagtcccaaggcaggcagccacttctctactcagaagtatacatgaaatcagcccgtagagtgtacttgaaatctctaaacacatcatccccaccatggaataagtgtctttgaaagatgatgacagacaccgtctttggaaatatccgaacgaattccctcgagttcatctcagccgtaaacgacgttgcaccactcagaagagtatcagtcgtaacagaagaccccacaactgaagcacagctcctgtcaccaactggacccttctcagattcaacatcagcaagaccaatctgccacttctttgcaaataacattactctccttcgcccacccaatatgaggctgcaactcctccatatcctattcctcatcccatctaaataaattgtgaatattataaagcgacttctccagctcatcaggcggaacaaagcactcatcccaatgaggccggaactaatccccaccctcataacgcaggaactgaagacgcgcattcagttgacagagacggagcatttctgccgttgtcactattgtggtcttgaaagccggaaatttaaaagggtttgtttgtgttatggctgggcttcttataccccgctttttgaggctctgcccgggaatactgcctgcagcttggtcgaaggattatggttagctcagctgtcctatcgtcattctatatagcaaagattttttggagcagttgctaacgatgaagtagttgatgtgataaaagtgacttgttttgttagtggtttatatacaaattgtaggtaactatctaccgtcttgctagggagttcgttcgacactgaggcggtgtggagggcggtaagatgggtagcgaaaaatcaggcagggtgtaagggccccgatgataacgttgtgtaagaccgtttaccaaaggtcaaagacacagatagtctgatgaatctgtaattcaaggcaactactgataatcaaataatttctatactgaattaccgttatcaaagatgcaaaggaaatgaagttagaagatccctaaaaataagattatgtaagtatgacatccgccacatgtggcacaagggattgtggctagagatttcttgattggttcacggcccatctcatctctcacatcctctcatcctccattatttggagccgacaaaatatcattatctctgatccgcctcaaagcacactcttttatttagcgctggacatttttatttctcgctatataacagcaacacaaagtgatctcatcgcccacaaaacaatcattgcgataacctcttgtctttcacattttgattatccacttcgaagctcaagtgcctattcaaaaatatctatatataactaatctcctgaagccgaaagttgcgtatttttgggttgagtttgactattggaacagtccctcgcaaaaagccatgtcaaccgccccgtccatggctgctaccaatcagaactccacccaagagccagcaaccagcaacagcgggacttcacagatggagtcagagatccagcttgtttcatcactagccaaactacaagaactcgaacgcaaggtaagtacacgagcccttacagctctgccacagagccaagttaatgagatatccagatccatgaactgcgtggattcatgccccagggcctactagagcctctagtgcctattgcaaacccagataaagtgtcactcggcaatccaatcgctgaaacgccacggatcctccgggctagtctagatgaaaccgcacgcgcacgcgttgctgatgtccagcaatttcagtccttgtggagggatccggaattggccttcgtctgggcccatgttgaatcacgcatcagggaagccaacggccagctcttgcagccaacagggaagtgggaaagagattacgacgttcttctagaagaactagcacgaaaagaaaagtcgaaagtagatgagcgtcagcgagaggacgaagaggctgaacgtatcaaagcgcagtctaccgagggcgagtggaagaatgtcttggagcggtttgttcagcgcgatattcccggtatacgggttatcaagagccaggatgggacttctctagcggtagcacttgttagagctggtgttgtcttccagatcaaagggatatcttttcctggctccccagtctctgactgggaggtttcgagtaatatcgctggtcggtcacccacgaaacttgagaatgctatactggaatgtgtggggtcacgcccgcggaaatgggaccttgctttcttgctggtatgttctattcctgacaccgaaggagattcttgctaataccgatgcaggacatgatctcttcctatgcggatatcaagcagacgccatgcgtgaagtgcaatcgcctggctgataacggcgcccaactgccaactctccgtcgccctcgggcgaatgaacagtctttcaatgggccagcgcgtatatatacctttgacgcattgcactccggatgcgcctgattgaacggttcatggggcctgaatggacgatgaatatctcttaacccattcttgggtcacagagggaatttttggaagaccatcggctcagtgggctatatccatctcatcttggtcttgacggagaaattgattggaagcattcgagcgatctatctggatttaacagaataccatgcaaaccaccctcccaatacccctgattcctttctccccttcctattcattggccttaatctgcatgcttcccatgaatattgtcatgccaaaattccgctggatactcagtcccattttgatcccagtatcgcctcggaatacaatgaacttcctccttcccggtccatcccccccttcgagcccttctcccattgcaatactcaacagcactccacgtcccatggtccggggtatggtacttcctcgtgcggaaatcatagcggtcgcccgcgggccgccgtgcccaggggagcgggctgtagttcttgtcagggtcgttggggttgctctcccatcgggaccattcttgtcttgtgggctctgaccggggttgagaggatgactttctggtcttggctttgggttggccgattcggcccacgtagatgtctggccctttgcctgataggacatcaaagaagcgccagcggcgtggccagtgttgtgggttgccggggcgtggatctttaggccagatccaacctagttgggagggcattgtttgtttgtttttggctctggatacttatcggtgatagttgggagtgaatgttggatgtggaagacttaggacagatgaaataggtaggtattagtttcatggattggagaaagggcagaaggagattaaatagcctcctttattttctaagctttcatctcagtcaatgaaccgcttgaatgacttcctacagctttttttatctgtaagacactccaatttccaattgtatgaagtaagacatcaagctgttcgtttgtctttgcgcaatgattggaacaattgcatgggaggtgggactgaacgcctcagctcacaataaagggaatatcacggctgcgcgcatggcagattttatatttccggtaggcaaaaaaggatgatctagacgatcaccatagagtacatgtatgtatttattcttttgattggggctatagtatatacacccctgtgtagccaggtcattcggccatagatctataaatgaatcttacagacaacggctaagcaacacagcgactaagtaaatcttaaatattaaacattatgtcattcatgtttcagaactgtctcgatcttgactttttgatttcattgatctaaagccttaaacatcaatatcattgcatcaagtgactctccaccaaagaaagaaccctgacacaagtttctatcaagttaccgtgcaagttctccagcaaggccatggaaatcatgagccagtcacttcccgcaaaaacataatcttcaaggtggacgaagcagacaaggcccatccccactacactggctatctgcaacgcatagcctcccatggaggcgatgtccaccaaaaaagacaatctctacaagagggctctagatcatgacttcatggggtgaaatgtgttgatagtaccccagtgagagacttgctgtgcccggaacgggatttagatcgcagtgaaaccgagggagaactcagggtatctggaatcaaggatcgaaaatgcgatgcaacggatgttggattttgtgagaaaccgaaaatacaaaaaaatcaaatccccaattgaccatctccccttattattaacaaaaatagaaccaatagataagagaaaggatgagatgcagaaagtgtacaaagataaatataaaaaaaaatgacggaacgccgcttccttgctattatcgtaaattcagatcgcttcaacaatgcaacgccccaaaatggaaaaatatgttcatggtcagtcaattcgagtgcaccgagtgggtgcccttcaagtggtcaggacaccagcactgcccgcaaaccaggtgaacgaagcgaaggtgatcacggccatgccgacggtgaatttgatagcgagacgactggtttcggacagagcgccgctgcaggtggcgcacttgaattctagacaaaggttagcagtctgtttgagcgaggatggttggtataaaaaattcaccattgagtggggtgtaagactggggtgtgtacatcccgaagatgtaaccaccattctgcgagctcaagtatccggcactcgcggtgtcgctaattttcttgctggcatcgtagatgatcagagtatacgatgcggtaagcaacggaatagtagccgatgactgatattttccagtatcccacacaaggcttccggtttgctttacgctcatgttggagctgagcgtatatgtcatcgagttgagactgcacgaagccacgacgttgaccgcagacggcgtgaccgacaaagaagtatagttccatacaaatgtcacatcctggccgatcttgtagtaggtcgtggacgaagaagcgggagtgatcatggacacgccgccagcagcggcagctgggtcaatggagatggaggtggtagtggtagtcttggattttcccgtcttcgtgccagttgttgtgccggtcgtatcagaatcggttgcagtgcctgttgtcttgcctgtttttgtgtctgtacttgtgtcgctgtttgtgtcggtgtttgtgccggtggtagttccggtggtggttccggtagaagtcttggagacagtggaggcatccgtggtagattcggaggtttcagcggtcgttgtctctgtggtatctgaattgcaggtcagcatcaagggcaatggtgtgataagagtcctgaattacctgctcgcttatccaaggagttacccgggagttctccatagggccgccatggccaagccgatgagatcgttcccagcaacaagatggtgcagaacacactcaaaataaaacaccgcatgtcgaagttttggagagattatctggaagttcaaaaatcaagcgaccgaggtattactccctgggctgaaaggtagactgatcacgccccttgcacaacccggtgtgaattgtcaaaaaaaaaaacacagaggcctcctatgtcgaaacaggcttatcgatttgatgtccgtaccaagcaatttcggttgctagggaaggacgatcaaaaggatgtgcagtgcagaatatgttattaatccccttgccagtctgggcactaaaacatgtagatctcgggagtgtggggtttcgactcggagcaacgatggtaaataatttcaaggcaaatagtaaacgactgtctttaccttcacagacaattggagagagggaagaaaacagagagaaagagaagatgcgatgtttgagctgtattgaggagctaagcccaaataggtagtggctgtccagcatgtgagacatgggctatttatagcggacaactgataactatctggactatgtatttggactatttggactatctagaataccaaattcattgtgctataaagctgagaagtgtcaagtctaagtttatactcgttcaggttgagcaacgcaaaagttcgactttatcagacacaagattgcttatatatctatcacattatgagcatgtaaatcatatgagcaccgatcatttattcttatcctttaattgatcaaatccatctcacactgaaacagaggggtctgcaatatatatgtttcaattcaggatatgtatgagtgataaccatgtacttcaacgaaaaccttcgaactgatattcaattaatcacctatcccagaagttgaccaacatccgactatcattccagggctacaaaacccagataagtgaatgatgaatggcagtgcaccatgacatagcatagttgcacaacacaacaaaccacagccctactctgtactatgaaccggaaccgatgtttgacgccagccatggagtaaactgtcatacctacataaaacagcgaccaactatactatactaaagggtatgatctacaatcgccacctggctgcccgtatccaaggtcgggtatcgctcggttccgccagagaagtttcctaaacgtgggggtggcgatgtagcaactcgcacccgaagactattacgaatttagggatgggatggggaagattgaaagatgtggggatctatgatattctctctcattgaaagactatatggcattggtgaggatccctatgtcgggagaagaattctacatattcgatatagagcattcacaggacatccatggatgttaagaagataacgagtagaataatcaagatattatcaattaagcctgccttatacgctgagatatgctgacatgaaaaaccaggacaagttccaaattttgaaaagaacacaaaaactagaaagcacatatcacaatctgatgttcgctacgagttgtaaaccaaaatccaaaagtctcaaaaccctctaagcagagctggtgggaatagcattgagctggatcctgtcacatccttccggaagtgcaggttcctgaacagtcttgctgaggaagtgcaagttggggaacaactggccggcctcgaaattggtggggcaccctgaaaaaaaaaggagtcagccattgcactcaacacgatcatgtagccttggaaaggggtataaaaatagaagaacttacacagccatccatcccagatctcactgggtccctgaacgccctggcggctgatagagaagcctcccgagccggaagtgggtttgacgctgatctgggcgcgccccttgcgagtgcctatatagtaccaatatcgttagtgatctgggctcggtaacagtcacattcaaaggtaggacagggctaagcttaccttccacgctgatcaggtcaagagtccaaggggacttggcctcggtatccaagataatggtgccattgatgaaggagaaggcggcagcgttgctagccgaggcaccagagaagacggcttcgctgttaagcgggtcgctggccaacccgtggccgacggagaggtacaggtcgttgtgagagctgttgctggaaccggaagtcctgaggttgaagagcttttgggatggggcggcggccacagcggtggctaggagagcgacggtggcgaagaacttcattttagatgatgagtgaagaattgggttgggaatgctttcaagttaatggttccttgaggggtttcggttgtttttatatgtttctttcaagagaggggtaggattttgacggggaagtgacgcatttatatgctttgggatatccatgggagactgtcgatgaacatgctccacaggtggagtgtagggccatcggactgtttcgagtgtcgaacgctgatccggatcctccgtatagagtagatatccttgaaatcaaaatagaagccgtcatcggtaaagcaggtagaactgtcgattgattgttcttcgacctcctttgactctataccctggcaatgttgctcatttcttcttctctttgtttttcttcgcagcatgcaaacatcactgcggttgtagtattttccttgatccatgctgccgtatcagaacctgtgtgtatagggtaaacgaaaggactaacccaccggatactaattacaatcgacatgctggaggtcattaagtgggtacctgactagctacaccatctaagccagtcatgatggtgatcgaatgcagatctcacccactggtgtgtcttctatccatcaattgaggcacctgaaacaaaggttggtggtattaatgatgtgattttgcccctatgattgggtcacacaatgatatatgtaggcgtaggatgaattttgtttcacaaatgatttcactaaaagaaaacccatcaagaatcataccagaatccccttgccaccgaagtaatccataaaagaagtcgacaaacaacgaacgccaagatcccgtggagcctttcccctgaatcctgtctgacttgtttaatatcgggctgcgactctacttcgtacaaacgaaaatctcttgcctatttggctcgatatgccctcgcttctatgtttttcgcatcattgataatttgtggtcccactagaaatagaatatggtccactgaaagcagtgaagttgagggctgttacatagttttggaaatattattagaatacccaacccctttctctttggtaggttacgtgcttacgattgacatgttgtttgatacttggcgtacatcatggaaggtgtgtatgaacgcatgtggcttgagttaaacggcagcttgcccctatgcgtgtaggaaccccttagtagcgtcacactaggcgttttaagcatgcgcctagtgggtactgcctatgtcgtatgccgtgatgtacattttgactgtgtaactgtataactagggggtatggcattgtctcattgtcattcattatctcgtgaaactcactatcgtacagaaagatagcctgttcgatttctgcccggggacgatctcagcccaccggctttttttccaagcccctcatcgtccccgattgctggcgttccgggcaaattcaggctttagagtccaccgacctcgacgatcacgaccatgctcaagtgtcgcaaccttcttcaatgactcctggaactcagcaacacgctgcggattggagcagtaatgattgaaatggtgaacaatcgactgcgacagagttggcccacgctgagaggcaaggtagtcacggatcaagggcatgaattctttgccgcgtggcatacgtgctgatggactatcagaaccacttgttctctgtccagcagccgcggcagcagcaggattgagtctagccaacaggtctgaagatgatggtcctgccccagcagggcgagccgagctaccaccagtccgtggatcttcgcggcctcccatcccaaaacggcctgtccaggtaggaagtccgatggggagtgcccgggcagtttcttcggctttgcggagctcttcggcggcttcgttggcgacgcggcgagcttcggcttcgatcatcttagggtctgcgcgaaggactcgtttaccgtttacgatctggtcgtgctgaacggcagagtgaacgccagaacgagcgaatataccatgcattatgcgatcttcggaagttttggcattattgtcctcttcggcggcgttctggaactcttcgacattggcaataccattaatgtcggtgataccgtcctcctccttgagagtcggcgcaggcttactcttgctgccatgagcttctttagcctcttcctggtatgtgacttcagcgttcttgaagagtttggtggtttccaactcgtcatcattttcatctgtaagagtgaacagatcatacagatcactcagctggaaaccttctctttgatgaggatcacgggtgattttattggtcaaaaattgtttgaatatttggcggtggtagattttctcttcgatagtgcccttggtcatcaagcggaaaatggtgacatcacgcttttggcccagacgccatgcgcgctctcgcgcctgcaagtcagtcgatgggttccagtcgggatcgtaaataatgacacggtcagcacctgtcaaattcactccgatcccgccgacacgggtggtgagtaagaatacgtggatattagggtcgttgttgaatgtgtcaaccagattctggcgctccttgatcggagtagttccgtccattcggaggtaattaaatccaccgagcgctccaaggaatttctcaatgatgtctagcatcagacggccctgggtaaaaaccagggtcttgtgaccagtatctctccacacctcaagcaaacccttcaaaaccttcatcttgccagaccgctctgcatcaccgtaatccgcgtcgcgagagcgcaatgtgtggtctgccaagtctggatggttgcttatcttgcgcagtatgtcaatgccaaacagagagtttcttttccctcgtatgatagacttcatgtcatccgagcccaggaacctcttgtatatggttcgctggagttgggtcaatttgcagaaaatgacctgttcgcttttcatcggcagatcagatgtcacatcagccttgaaccgctggagcagataaggactgatggcatctttgagagtttctgcacatttcgcagcagtctgcacttgaaggtttgatgcagatgcgtagccaccctgacggatggggatctcgaactggtttttgaatgtaacaaggtttcctaggcgcattggaaacacaaagtcaaatagggaccaaagatctaccagactattctgcatcggggtccccgaaagaatgatgcgatgtggagtccggagttccttgcagctgaaggtgataccggcatctggattgcggattttatgaccttcgtcaaggatggcgcagccccattcaacgtcaacaagagcatctgcataagactgcagacctgagtatgtagtcacgaggacatggccctcctccgtgacacgcttaatgatctttttagccgctttctgaccggcagataggtgccgagagctgcggctgctcatcatttctgatgaaagcgcattttcccgactgctttccttaccaagatttatcatcccgctgcccgatgagtgtaggatggagacacggaagggtggccaccagcggtgaaactcattaacccattgtttcataagagttgcagggcaaacaacgatggcaggtttggtgagtttattgctatgatgcagtgccgcaagataagaaatcgcctggatggtttttcccaaccccatttcgtctccgataattccaccaacagtctgttggtgcaactcccaaagccactggactccagttttctggtagggaaagaggaagcggctgatgtctccagggacacgcagtccattgtcaagttccatggccggttcggtgggatgtggcttaagccactcctcttcttcattcaggtcagcgtcgacatgatggctgtcagcgtgccgccgggcagagcttcgccgactgatccattcctggacgcgagactggtatatcgcctcgtttccatcatcaaccccactcaaatcttccagctcaatggtcgcttttccttgcttgcgcttgcgacttggcttggtctcaggaagagtatcaggcatgaactcttcaccctcggatgtagcgtcaccatcagaggcaacgtaacttgccgacgaatctgctcccagggagctacgacgatccaccttcttccgcttgctcttgctttcgctgctcgcgtcaaagtctaagtctgggagtgcaaggtcccggtgggacacggctgggtgatgtttggcttgttcgcgctcctcctcctcctcatgctgttggtcctcggcatcgacaagtgcatcgtgaagattaccaagtggcccatctctggagccctcctgcatcaatgcgaagggagtgatctttccagtcctcaggagatactcgcggcgggactcattcggctgtcgcccagacccgtgcgccaccgtcgagttgccctgcgactcacgcctctcgtcaatgcgctgttggatgtccttcaagtcttttcctagatcggccttgcgcatctgcagccttttcagctcattctcaactcgatggcgagtagcggctccgacgggctgtgtcaggcgttgctgggcttggcggacctgcgaatcgacccgtctgcagattaagttagtcacgctatcaaatatcaagtcatgcgctcttactcccgatccacgagggttttctcaagtcgcttgatgtcattctcctccgctttatctgccagagctttatcggcctgaaaaaaggaaagggtgagccagagtgatagtcaattgagacctgcctgggtcatacctggcgagtgatatctctttcgaggtcatcctggtcgcggacgtctgcttggagatcacgcagacgactcgcctcctcgttcgtggacattgtgaaagttgtccaaataaagattgcattaagtgaaaagaagtgagagactaaaagactttgtctagagtaagggataacatggtgattgctcaaagagcaaacacaatagtacaatagcacaggtagcaaaaagtctagatgaataacacaatctagatccatcagagcaatggcacaatcagccaccgcctatgataagcaccgctcacgtgagtgaatgactcattgaaagcttaggtaattctcatttcaggccccggggtctggaccggtagttaccacttctgttctcacctcgatttcacgtcttggtcagtccaacaacttcgttctttttacccgtggatctctcaaaccttgaaatgtacaaatatgttcacggacatcacagtgtgagaaacctcggatgaaaaagtccttgatggcatacagaattcgaggtgatgaaagcctagagcgagcacatcatcaggcctaacacgttgggataacacatatcgatccatatcatgcacgagcactagcctcacaaaattgttcgtatctggtgatctgaaagcaagaagacggttgctctcctcaaagtacgagagtagggcatcaagccaagaaaagagattcgatcttaggagtgtactacatatttgccagataatccgcaatggctgaaaatcaccatgcctaagagtacttttcttgattaattatctctatattcagaataccataccattattccaataagatgatcaatcccaagttgtgggctcccggcttaactaggaagtgacgtcccatgcctctccaattatatgataccatcaagaagataccccgttattaggtcattcaatattagtagttagttagtaaatccgttcagcctgatgagattacagccacttaataactcgaaagagacgctctgacagttgggcatgcaaatggagcgtcgatcatgtgaaaccagtaatcgccagggagaccacaatccagtactccgttcaaatgtcgagactttagcatcatggtcttgaatatatatgtgcatattgtataccaaaagatagaataccccttcaatatgccctcgtacagaggaaagaaatgacatactatatagactcagatctagcgggcaaagttcacctccacttcgttggaactcatctttccccctcttcttgatctctggctatatactagtaatatctctatgcttcgataaaagccattgtttaacatagtttttgttgatgctagctgtgtctttacagagatttccccttttcacgggggcccaagacaagtccattgacttggctaacccccccagccgcctacgtctactgcgtcgcaaccaaattgcgaccgccccccctctctccctttcaaaacttgtcttcaccaacaatttctcggatgatgaagcatagcacgacctcattttaacgccaattccctacttttcattctctattcgtcgaattccgtcaagactcgcctcgaacgtgcgatcgcattacgagtgccgactccgctggcatcccacggaccctgatcgcagtgcttgagaacacggaccccgaatccatttgttggcccaaaaagagggcttgcacaaaatggatcctgggtggcagccttatcaagatcctttaatgggccaccctgcgcagttcaatactgcgttggcatctcatccccagcaattagcctcgaaatacggtcagccaccacagtcacagccgcccgtcggatacacgtacgaaacattccagacccccgtcacgacatctaaagccccctcggctggctcaaattccaaaactgtctccatggcgtcctcccccactgccacgccacgtactcgggattatgtcaccgacgcggatactaccatggaggacgctgacccgtacaaccgggcaaagtacccctcgaggccaaaccacaatcgcgcctcgtcacaattcttgaatcaagcagaagaatcatcggctgcccgcagatactctccggggaatgttctttcgccgccgatgtcatatcccactagtcctggcaagtcccaaggctcctatggatttccatccgcgcctcagaatgcttcccgtcggtcccccgcgagaccagaatatgcatcaccaccacaaggatatcaatcgccgccatgtgagttcgatctcggtctcttgttcggccatgtcccgtttgctaatatctcgacagccaaccggcccccaagactccctccccttcaatccggcgacctcagcccagaccagtactacccaccatccgcatcttcccacatgagtccaggttttggtccaggggcgcgatctccgcgatctggctcgctgccatctcaggctcctctagtgcccggtcgcggtccagttcccaagttccaaaagattcagtctgtccaagaactgaagccgcgcatgaatatacagcccgcctatcggcgcgccaatccagagggtggatttatcagtgtgagtgctccgcaaacctcactttcttgtcgcgttggctaacccgtccagccacttcaatcgttgacaacccacctcccggccacttaccgcatatgcaaccctggctttaactatgagtcttcgagaaacccgcgacgggtattgaccaaacccagcaaaggggtcaagaatgatgggtatgacaacgaggatagtgattatatcctttatgtcaacgatatccttggaagcgaggaagccggtcacaagtatgcccccgatttcccgataatagccgaaccctgggctgacagttgtttctccttctgatttagaaatcgatacctcattctcgacgttctaggtcaaggtaccttcggccaagtcgtgaaatgccaaaacttgaaatcgggagaagtagtggctgtcaaagtcatcaagaacaagactgcctacttcaaccagagtatgatggaagtttctgtgttggatctcgtatgtcatattcccccaacccctatcgttcggatctccgctgattacccgcagctcaacagcaaatatgacaagaacgacgaccaccacctgcttcgtctcaaggatacattcatccaccgtcagcatttgtgtctcgcattcgaattattgagtgtgaatctttacgagctgattaaacaaaaccaattccgtggattgagcactacccttgtccgggtgtttgcccagcaactgctgaatgccttgagcttgttgaacaaggcgcatctgattcactgtgatttgaagccggagaatattctcctgaaaaagtcagtatcgcctgtgagctttcagggtcagtttctaactgttcacagcctcgagagcccgatcatcaaggtcattgactttggttctgcatgcgatgaacgccagactgtctacacctacattcaatcgcgattttaccgttccccagaagtactattaggtttgccgtacgtacactggtctcacatgttttgttccttattaatttgttcctagctactcatctgccattgacatgtggtcccttgggtgtatcgtggtggagctcttcctgggtctccccctgttccccggctcttcggaatacaatcaagtttgtcggatcgtcgagatgatgggtatcccaccaacatggatgctggagatgggcaagcagtcgggagagtttttcgaaaagacacaggacgagttcggaagaaagacgtaccgcctcaagagcctggagcagtattcccgagaacacaacacgaaggaacaaccgagcaagaagtatttctcagcctcaacgctggaggaaattatccggagttacccaatgcctcggaagaacatgaagcaagcagaggttgatcgaggtaagtttcccttttccactttcaccctgagactttctaatcatcgcagaactgaataaccggattgcatttatcgactttgtacggggactcctgtcaatcaatcctctcgagcgatggtcaccccaacaagccaagctgcacccgttcatcacccagcagaagttcacggggcctttcatgcccccaatgaacctcaagtattcgacggccactaaaccggcaccgggagttcaacagcaacagcaggccgaagctgctagcaaacaaagagcagctcaggcggcgcatgcgcaaaatgcctatgccgtgcagatgaaccaatttcatactccacctcagccccaaccccagccccagcctcaagccccgcccatgtacaatggcatgtacccacaaggcgcgccgcctcctccataccctacccagcagtcccctggctacggtcatcaaatgggaatgatgccaggcaaccaggtacctcctcaaagtctatacgcacaggcgaccacgcgagcaggccgccaacgagcatccaccatggaccccaacggaggaattcccactaccatccaacgagtcgctagccacctggatcccaacgcgccaattcgattgcagcccagccctgcgtattatccacctcctcctgacgggtacgtcgatgctaatgccagtcaacggcgtcgtgggagccgagcgggtaatgcgaatggaaaccaacgcaatcgggattttattcgcacccttgaagatggtgtgcttagcgaaggatacatgggtcagaaccaatggcactagggaattggggcaaaagggcaattcccgtgcccagcgttctctacgactcgggagcaggcatactgatatattttgttcacgggtgtcaatgacctccaaggcactgcatttgtaagccttgctctgctgacccattccttgccagccgattcgttcttatatggctggctcttgtaggtatgagtcaagaaaaataccccttcagtgggttaacgtggtctacaatgatctggaccgctgatacacgatctgcattgctacctagcgctagatcgattcgcacgcttacttgccgtgagctgtgcccatcagtggccaaatcattcgccgcgagatatcactccccgcatcgtcatcactatttcattgcgtttcagtacgtttcgttacgtttcttgccctgttacgattccaattacgtttctccgatttctttaggcagtgcttcggcatgtctgtctgccttttcgtgaattttctctttcagcatagcctggatggagcatgaaagaacgatctcatccatttctttttcttctctcctcgtaactgtttcacttaatttgcaatcttcctagggatgctgatctatcctttttttctttcttttggtcgaggtaagcctctcggtcgcatgtcatggcatgtcgtttctttcgggaggttccttgttttatttactgcatgcagtaaatagtagagttaatagtcagacgataaatgggacaaacgttacgggttgatgagtgtatcattttgcccatattcactagtcaagaaacttctttgcctgcgcctgcctgatcggtcaggccttgattcccggatgagaggcggtttcccaagtacaagcagataaaagtttcctagacttctttttcggatgattcgtactcttttgaaagtcagcggatagtcgaatagtcaaaacaagcaagcagaagcaagtcgaaggaatagaagaagtataaaaaaggccgtcactatttctttgttatgcgctatacctaatctagtttagtcagcccctcgcttaaatttcgtgtgtggctctcaactgcgggaacttcgactttgtatcgccgacgacctgattttctagctttaggatcgccacttccttttaacgaaaccgcaatccgcaaacatggcgtcgcgtttcttctacggcagcggcagcgacagcgacagctcgtctgatgaggaggaggaggtctaccgttccggctccggcagcgaggaagattctgaccaggatgactccgactccggctccagcagcgacagcgacgaagagggcgaggagggccgcaccggtgcctccaagttcttgcacgatgactccgaaagcgaggagagcgaggaggaggagaaggttacaatcgttaagtccgctaaggacaagcgtctcgagggccttgagagcaccatccgcctgattgataacgccgagaagatcaacgactgggctgttatcgccactggtgagtctatacgctgcctgggaggagtgaagagccagccaaattggacgaccccaagaaattgcatgaactgacatgattcccaaacagagttcgacaacctgaaccgccagatgttgaaggttaccggtcccacccccaaggtctacatccaagccgttgccgaactcgaagacttcaccaacgagaccgcttccaagcagaaggcctcgaataagaagatgaacgctagcaacagcaagggcttcaacgcggtcaagcagaagattaagaagaacaacaaggaatacgccaccctcgtcgagaagtaccgcgctggtaaggaagccttcatggcagatgaggtcgaggagaagcccgcccctgctcctgcccccaagcccaccaaggtcgagaggatcgagaacttcgctgccgccgtcgctgcaggtggtgaggatgatggattcgctactgtcggacgtggtggaaagaccctccagtacacccctgagagcatcctcaagcacctccgtgtcattgttgagtcccgcggaaagaagaacaccgaccgtgccgaccagatccgcaccatgcagaagctcctcgaggttgccactactccttaccagcgcatccgcacctacatgaccctgatctccacccgcttcgatcttactgccacatccaccgccacctacatgtcaagtgagcaatggcaggccgcaaacgaggaatactccgctctcctttccgtgttggaagaaaatcgccaattccttgtcagcgaagccgccgatgagtgggaggacgacgagaagcaacctactgttgccgagggtgaaaccttcttcattcccggttccgttgtatcacttgtggagcacctcgacgacagcctcacaaagggtctccgcgagattgaccctcacacctcagagtacattgagcgtctgacggacgagcaggcactttactcctcgcttgttcgctcgcagctttacgttgaaagcctcaagggtgccgataagaatggccaggacagcatgaacagactggttatcagacggttggagcacatttacttcaagcctgctaatgtcattgcgattgtcgagcaagcgaaggacaaggcagttctcacaaatattgagtcagcagttactgctacctataaatctggggatgtccagagcctcgtggcctctatctgcaactacatgttcgaacacagtgatggcattccccgcgctcgcgccatgctctgccaaatttacttccttgctctacacgaccactactacaagtctcgtgacttgatgctcatgtctcacctgactgaaaacatcgccactttcgatgtcagcacccagatccttttcaaccgcacccttgttcagattggtctctgtgccttccgtgctggactcatctacgaggcccagaacacccttggtgagatctgtggtagcggccgccaaaaggaacttctcgcccagggtatcatcatgcagcgttactccactgtctcgcccgagcaggagcgtctggaacgccagcgccagctgcccttccacatgcacatcaacctcgagttgctcgagtgcgtttacctcaccagcagtgctttgcttgaggtgcccctgatggctcaaacctcatctgcccccgagctgcgccgccgcatgatctccaagaccttccgccgtatgttggactacaatgagcgccaggtcttcaccggtccccccgagaacacccgtgacggtgttattgccggagccaaggctcttgccgctggcgactggaagctttctgcctctacattcgccgcgatcaagatttgggacctcatgccccagcccgagttgatcaaggccatgctgtttcgccagacccaagaggagggtctgcgcacctacctcttcacctacgccccctactacgacagcctctccatctcttctctggccaccatgttcgaacttgagcccaagaagattatctccattatctcccgcatgatctcgcacgaagagcttgccgctgctctcgaccaggtcaacgacgccatcatcttccgcaagggcgtcgagctctcccgtctccagtcccagattgtcaccctagccgacaagtccactaaccttctcgagtctaacgagaagaccctcgagcagcgcacccagggtatggccaacgccttccaacgcgaacacggtcccggtgcccgtggcggccgcggtggtcgcggtcgtggtggtggtcgtggcggtgcccggattccccagggcgatcgccgacccggtggacagcagtttggtggtggtgcattgggcgcagcgatcaaggcttagattctgatgtaatggcatgttctttctcttttttcccccctttcttcatgttttccttttttactcctgtcatccccttcgtgttggtacgaccgttcctttttttttaggccggaaaaattgccccgtttctgcgctttttttgtgattgatctacatgatattcacgtatggaaatgatcgagaaagaatcaaggtgcatactggttagaaattgacggcttatggattagttcttagttttggtgtgtgcggtgtttgtagagttatatatgtactgtaggaagtattcgagcctcctcatagatcgtaccttcgaacgtacaagtgggcttctcagagatgaaacctggcggcttctttgtcactggttctttcacaccactaacatctcaaatgctttgaattggaacaaaattccggatttgtcactcttcgcccgttgtttgtaagtctctctagcgtgtttgaacgaccatactttcctcgagccatttcacaagctgtcgacaatatccttccttgaggtaccattttctcggatgctgatcaaggcgccatttcacaatggagttggcgagcgagaagctcgaaagggccacgctacatcagactggaactataccactggtcatctattacgctttgcttctttgccctgctgtgctttgacaaaaatgcccggtccttttgacatcttctttgattcgagccttcaatcttggacgtataaggtacatcaagatgacacaaagaaccttgaagcaacaccaggggctgaattgcggagtgaacacatttcaacctcaagtcacttcgattgatgagctacaatcccgaggtcccagggttactctgtcgaattcattgttgtcgagcacatgagcttcttgaaagatccaaaaatagcaccttcccctcgatcagtttgtctctatccacacaagattaccttcctctaatccctcattccaatttgtcgttttctttgtcttgtaaaattccacaggatggttactacaaatatcttctctatatcccacatctcaatgcttcttcttcatcccaagttgccaggccctctcctgcagtgctgcaaagtccatctcctttttcttcaagatgccccctcgtcgtagtacgaagcgggcgtactcaaagccccccttggaccctgaggaatctccgaagaaacgcaaatcgaccaacggtaaaagggagatttcttccccttcctctgatttttcatcagacgaaattgaaagtcaattgcccctcttgccagaggactacgactaccttgactacagcatgatgtctcaaagtgtccaggatgaagcgtattcacgccctccgagacaacagcgatggaaacacaatggggccaaacctattaccgatccagcgcttgtcccggaaggttggaatgcggacgaactagatcttgatgtcaatgatatcgatagtcaagttgagagatgtatggagaggatcagtgagggaatcttgccgggtttcttcaagttcagactctcacaatatgagaaaagaagggctgctcgcgatgaaatggtccattctgagccagccggactcagcttggatatcgttcgacgcctgggccatttgaaggctatcgagacacatctcaccacgaatgaggacccggataatcagcttcccaatgtcaaggctctcatcaaagcttacagggaaggaaaattgggctggtcgagaggatgggtgagctactggtggaagggcatgcagctcaatgcgccccataagtttgacgtcgatgttcataagaacatggctgagcagtacgacaacactaaggcgtggtgggtggaaggtgtaagttgatcatcactacatacatacgaacattattcttgattctgacttgagatgtcaaatacagcttcaacctccaggcggtggcagtctaggaggttttcactcgtttgcaccgtatactaatgtccacacaattcaggtatagtgtctatttggtctctcagcttattatttcttctttctaactttcatctcttgcctttcatatagttcccggtgcatatatcggctgatagtcaacttcctggtgctagtggcctcaccctatacgtgtgccatgatactggtgccgatattatggcgatacctcaatgctatatagaccagctggagtcgctaggtatccccgttccagttcacggctataatattatggaaacacctggctcttcatcatgtcacaaggttgtggaggttgacgtccgtctgaccgacaacaacggccaacctttgacccgttggatgaaaatacaggcctgtgtcatccaatctaggcccggggagcactttggaatgcttctttcggggccttttgtgcggttcgcgctctacactgctacatgcccagatgggcagggacttctctatgtttgtaatcacaagaaggagctaaggcagctgccagccatgccgggcgactttgtgccaaggggaccaccatttgtggctaccacccgtccagctccggatggtggagaaccaccctactttttactacaagagacgcaacgcatgagaccggcaacaatgcagccgccccaaattccgctaccagcgaagacaccagcgaggagagggagaagaaaggggaagggagggggcccttagtgtcgagtgttctgggatctgtacatggactcggctgtttcattttgacttgctctcttgttgattaggttctgcgtgttcctcactttcttggctttcatatcagacattttgttggattttatactggatttcatctttcattatactttcgttatatatctgctccaattgagacataaaatctcgcactgaactccctcaacacctctctccccttggatattgtggagatccaccaggctttgtagataaccaagccctttgaaaggctttctctcgaagacatcgcggcactcatttcctcaactagcatatcacacagtcttgtagtcagccggccttcgccgccttgggagggtacttcttcccatccttctcaacttgaggtgtacaggaacaccactcgcctttgggaattgagtccatcaccgaagggatatggcttccacagccccaccaggtgaccttgtctgtaataagtaagtactggtctgttgacacagagatgggtggaaactcactgcaggtcgagcaggtagccttcatacacatgatgagattggttttgtatattggttttagaaggaagatcgctgaagtgggaatgtcggaagatttggcttttatattcttttccctccgatattagtcatagccgttaggaccgcgggggaggggagttcgccgatgtctgaagcccgaatccccgatgtgtggtttctggggatttgattggagtttggcaatatgctgattaggagttcgaaatagataagcagaagcaggttattctacgaatgttcgaatgtagcctttataataggagtagaagtactccgtaaatgtttgaaaatctgcagattcttggtggggttatcgcccttccgtggcaacttcaactattttaactaccacacttctcaatcatgacggtcattgctgtggctggtggaactggtggagtgggcaaaactatcgttgagaaattgctggactccaacttcgacatcgtcgttctctctcgcactgtacgcaagcagagacactttccacctgagaaagtaactgacctccttaggtgaaacgggactttgcttcgcagaatattcaaaatgtccagataaactacgatgatattccctcaatggcacgcgtacttgagaaacacaatatccacaccattatatctgccattggtcttgtttctgacgagacaagccagtctcaattgaacttgatcgaagctgcggagaagtcggcaacaacgaaaagattcattcccagtgaatactcattcgtccaaaccaccgagtaggccggccagcttcagctgtatgttattctatgctgatattgaatcttctaagattactcccgattgaccctagcattcaatactggcttgatgcggcagatcgtctcaaagccagcggcttacaatatactaggataatccctggtttttttatggactattggggaatgccacatatccaaactcacctgcaacctttcacctttggtattgatatatctagcggcacagctgcgattccaggagacgggaacaacgtgatctgtatgacatacacgtacgacatggcgagttacttggtcaaggcacttgaccttgatgaatggcctgaattcagtgtaatcgttggagatgaaattacctacaatcagattctcggaatggcggaagaattcaccggtaagcatatcggacgcccttatttgagatacacccgcaacctaataattatatccgaaacaggcaggaaattcaaggtaacttacgatagcctggagcaaatcaaggccggtgatgtcaccgttcctctgcagccagagggaatagaatactcatcggacgaactcaaagaagtgactgcgttggtgagcagactcactgtcaataatgtctttcgactaccggatgatcgtctcaatactcggttcccagaggtgaagccaactacgatgagacaaatcctacacaatgcctggaacagaaatagcacataagttcatcaataccagcaagcttcagaactttgatttcatgaatgatcatttgtaataaaagtgcaaacagaagtcagaactcgaaaattatcctctcattacctccattgaagagtaggatcaaagccttcggtgatattatgcattcgtttctttgaactacaatagcagtaatccagacgtcaacctgattgtctagcagacaggcccgggacgctcgactgcaacacagacctgtcggcctggaatcagattcgagcaccaggggttaatgtcgtcgttccagcacagaagctggctcatggtgaacctattctggttccgcgcgatgatgtcccagcaggtctctccattactgacagtatagaactcggtacctgattttacgtcagtctagcttgagatagagggatttgttttagcttaactcacaatattgtgtcagctgccagccttggacggtattggtgttgacggcggcagatgtgccaagggaagcaattcccagaatgcataggagagatcggacaccgatggcaaccattgtgggctttggagatacgcttggacttattgactatatgtgtctggagactagcaatgggactgaagagtgttggtgattgaataaagaaaacttgaaagggattacttgttacttttatatgtgggatttactgagccgcaaagtactaaaggtcgaatgtcgggagtgatcttttgccttgccggacaagttcatatgacttgagaagtaccgtacctgcaaaataagcgggtaagggcatataatccagctataggttgcatttagattctgttgttgcaaccatagttgcaatgaggcgctgaaacaatgtgaacggcaacatcgcgaaattagccaatgggttcagtgggctggtcttcaccatggcttcgttcttttccattgattgatacatgtctcggcttgaccgatagaagtacgtcctgttttacggttacattgttttcagatatgattcctaaagggagagtaaccttggtccagggaggcctagtcgttatgcagataatagtgtgacaatgacctgagccataaccattcaccgggggtagagcaaaggtagcgcaaacagatacctaagacacagctgaatcgtgcgacaagattcaatagtcatggcggtcagtgagcaatcattctataggcgatgcatttagacttgattatggttcgcggctatttgctatggctagattgggttgttatacagagtaacaccccgttgcatcgccatgggtttgagcaaatagttctttgggatagctggtcctatgacagaattcggggaagaggttcgaaccatggaatttgacgagctcaagatattgctgatgcagatcaaagtacatcgacggaacctatgttagggagtacaaggtgtacaggatcacccaattgaatcaaatgtttatatcatattattgatggtctgatggtggtaaagggttattaccactctggtctgatctaacacagtgatatcatgccttctgctccagttctctagtttacctactgtggcactgattacctggggctgctttttcgaaatctaggaatagcatcagaaattggctgaccagaagagtgaggtctagattcatgactcgaaaaagaggttatttcgctatgcagaccgatgtgggaagtttgaaagtccaagttttccagaaagccaagatggttctaggccacttcttcggtaggccgttgatcctccccgatgaatatttcacagcgagtgcatttaatcagaaattccaatcatgcagttatctgcggcacaggctgtgactccgatgactaccgaggggaagtgttgaaaccgatttactagttgtacatcgtattggcctgaggcatatataatgactcagcatcagtgcctaaatgcctaaacgcttgaatcccaggagtcagtgggaacctcagctacaattctttatcctgatgattgcagccgattaggggttgcaagtctgaagcttttctttggtgatactatacaatcgttttgtatcatggatggaaacaccagcaacgttgtacgccttgccaaggtatcgactagcccccagatggcccttatggcccccatatattgagggaacgactgtgattggatgctgacctgcatacacaaacaaggcatgcagtatatgcagacggaagaaggtcaaatgtgatggaactcggccggtctgtgtcccctgcagaacattcgacttaccttgtaagtacgaggacaccgtgcgacggaagaaaaaactcaaccggtatgttctgcttggcttgttgattctaaattaaccatattgacttactcacggtgaggaacattttcatgagctggaacagcgcattcaatctttacaaggcgaattaaatcaaacacatgcgtccaagagacagcgactgctgagtgatgaggagacaggcccagagcatatccaaccgtcagaagcgtctgattcagagttaccatctccgagaaatgacaacgccccagcatcattcgaggccgaggccgatcgagacgatggcgatggagggtcatatacccttaaaactccgcaaggctcaatgcgattttttggtgagtattggctcgtcaactatccttcctcaacggtcgcacgaatggctgggctgattctaccgactatgcctaggtgcatcctctcatttttcaattgttgcccctgagggtgtgggctggcttgagagcaagacgggtaacaatgtatggcgccatgtcgctcagagaaacagcactcgatggagactagccgactggtatcctcgaactcttcaagatgatttgcaaagcagatgctcgcaacccttaccgtccaaggcggtcatcctagaccttattcgtgaatattttgacacgttcaacaaggccctacctcgaccctaatgtcccttctcatattaagcatggtgagtattatccagaaatctcccttaattcaaacgttcatcatcatgaaaccatatctgacctatgatatttgtagaattttggatgatcaatgccctaccagctggtcctcgcagtctaaaacacagcacgtctctttgtacgatgccagacgattttgaggctggatacggtggtgcacaagcggaagcagtcacgttaacagccgatcacactccgggtaaacctagctggattacattttgtgctggggtgtggtctgtgttgcaatttcagacgaaagtctggtatcaacctgcacagaaagcagcagttgtgaaaaacggtgaattcctttataatatgatacacaacacaccagagcgactcctcgcgcatgagttcacccacgggcatacccaatttggtgcttatcgtgcaagtaagtacttgaccatgcgacttccaacatatcggtctgctaatgaatggttctataaactgttttagtggataaagcgtatggctggggacctattgttgcgcttgctaaaaaagacaacgctcaaactgatgctacccagtcactggctgtcataaatgctggtacagtttcttttctgaaatattgacttgtgaatcttgctaattatctctagatactttcacatattggatcaatggtaagttgcagagatccttatggctccccaagacgacaggcgctagattgaactaaccaccgacggctaggtgtatacttggagatgtgcaacttccgtagcgggaggtgtgaagaccctgatgaagcagcaaaaacgccctaaaactcggactcttcctgactcactgtgtgcaagcaagtcttcctcgggcctcttcgcatgtgagtatctctgcttatttggtatccccggggcccagttttgatcttagagcatattcatctctgtgcctattcattctaacaagcaagcgaagtgttccagttgttccaaggttggaaacgttacatgtgactgttgtcccattcacgtatcttgatagtaaacttggaaccttttttcttggtatataatggagaaaatccgtaaagagaaagacatgcaacttctattaccttatattgattgaatcgaatgcagtgttaagactgtaatgatagagctaaattattcgcagaattattgagataaatgcaagctgacattttcctaatatcggtaacatccaaaagggcatccccaggtcggcttctttttccttttgcagtcacagtctaatctagtaaatgagccgctgtccttccctatcatcttgtcgaaccaatcctccatttctagcttccattagtaactacagagagtaaatagggaggtgccactaaccttcgtcttccttatactttataatgcgatcggccggacagcgagcaattggccttaaccgggaaatccaatcctttaacgaaatattggctttgcgaatatcaaaatccactttgcccctttgtttatctgtagtgtcgattctttcgaaatcataataattgccgtcacagataatatcttccagagagagtgtttctagagataactcgttccgtaaaatgtccaaaaagctgggcatagaagtgatcttttcttcgttgcgttcccatgccatcacggtttcccgggtgggacagacaaaacctccagctgtttcagatggctcatatgggtgatatgtagacatccactttctgctccaatattcttctgtcgacgcctcagaggaatcggaagtcgaggaaagctggggtgattggggtgcactttcggccgatgctgtttctgatgctggtaggactgataggggggctggtccatattcttgcggggacacagtcggtgtgtacggtgacgatgttgaaaatgatggcggtgttggttgaaatgacgggactgtaggtccatatgatggcaaggttggttgaaatgacgggactgtaggtccatatgatggcaaggttggttgataagatggcactgtgggtccatatgatggcaaggttggttggtatggtagcactgtaggttgatatgatggcgatgtatatcggacagatctttcattttcctggcggtcaggggactcagcatcttgcgatcgagggttttctgtggctcccgactcctcgctgcctattgtaacccgtctgactgtaagagtgaccagacttttcttaacactgagcaatagtgatctcaaagagctgaaattgatatcaagcttgtttatatgaagctttcggagtcgagtgaagccaatgtcatggaacatgtttccaacgtagccttttgccggataggcatgcatgtcatcttgaataagataaaaaggcatatgatcttgcgacaaggtcagtacttccagttgaggtccaagcttcctgaaaagtttcagccaagctgcctcattgagatcaatgcataaatgaagatcctcgaggtcttctaaagtagacagcagagaatctaattgctcttcggagagggcaatcctagggccgatatcataacagaatttagaatcgcaggtagacagctttcggggtctgcagcttgagccacataacgcaagaaaaagctttgataatgccaaggagtttagtttccgtatctgactagccttattggtacgcatagactcttgcaggctataaacatcgaatcgaaaatcgatctggctcatcatctgtcgcctgccgaggaacggaactgtctgctgccggggatcaagcaaaaattccgttctataat
